United States Patent Application Publication US 2005/0208558 A1 - sequence listing, part 38

SEQ ID NO: 42272 - DNA, 4032 bp, DROSOPHILA
ctgctcaatgccaataatcccagcttgccgatgggcatcaaacggcaattgagtaacttgagcaactcttcgctaggacacctaaatgccgctcatctgagtcaacatttggattcacggggctactgcacgcgattctcgctgtgtgcctattactccagccccccgtgccatgtgcgacctctccgtgtgactcttcccccaagcaattacccagcaacagctccgtacgccaatcttagtgctcactttgccaggcttgttaaaggcggcggactgaggagtgctatcgtaaagatgcttctgtatccgcaggctcgccagagcatcgatctcaaaaggattgcgttgcgcaaaaggcgttgtcacaaggcatctgcaaagttaaaagatctcaataccaatcaggattcggggcagtccgagttggaacgacaggatgcaattgaactaccaacggactcggagagctatgacgatgactttgaagatgattttttgcattcctgcgactcggatccgtttgaatatgtgcagttttaccaaaacaagcggaacgattccatgtgcaactccacaggcacattcgtggaccatggcacgggtgccaggaggcactgttcctctatcaacctcattaaattggattccgcggacacggacgaagttctagcgctcaacgagttaaaaaaggagtctcttgttataggatccagagcactaagagctttggctcggaagtccacgactcgaaattccagtgtgcacacatccacggcaactttggagctaggtgtgggtggcagcatcacaaactgtgttgaggaagagccaattcttaaggtcaagccatcgttctccctgcaacaacaaagttccgatgcgagttccatttttgcagctagattgggcggtgcattcaccgcctgcgagaatctggccagtatgcctgatgatctcagcagggagtcgagtatccaagagccacccactcctctgccagcttcaccgacagaacggcacagcatgccgaccatatttgtgggcaatcggttcaaccacagcaaaaatacagaggtatatgtaccgacgtggcgagatcgccaggaaatgcagaatcagagtgtggatgcgaagcaggatgaagagttgcactccagttccattgatctacccgccgcctgtctatctgctccggataaactgcaagcagaactactctacaattacgacgagatcctagaaaaacctctacagctgcatcgggagctaacgccctttccgggccataatcttaactcggataagcgagtttcccacaaaagcgacagtccgtcgacaggaaatgcaaagacagatccaaatcttgccacaagaagtagttccaccaccgaactctgcatcgataccacttcaaaaaagcgcacaaccccgtcagagagaagccgggattccattaggcgctgcattagctatcagttcctgcagatgtccaatcgaccgccccctccaccaccgccacgcagggatccggatctacacttagacaccaaatgccgctgctgcgaaaactcccagtgtcccagtccgcgatcgagtgacagcggaatggctggcagttgcactattacatcaccggatccgcccaatccggaatcatactttcccatggaggccgcaggccacgatatgctggataatgtggagccagagaggtttgatgtgtgcggaatgttcagagagaagttcctcactccggaggctactcaggatgttgttgatctatcagaggagcagcctcaactatcagatgaacccactacccctaccaatcgcaaagaggaacctacttgcatcacctctgctcaagtgcaagtgaacacaaggagtatttttctgccctccagctcgagcatggatgagactaacaggaatgtcccagccaacaatatcctatttagctcgagttccgcggatcagttggaaccgcaggccacctttcgctcggggatgtatgcgcactggtggaagaaagagcgccttccgccggaggtggtgcgtggcatagcccacgcctacaataagagcttgccctccaaggactcaaaagattcgggatcggtgtgctccagctgcttctgttccctgggagctagcggttacagcgagggcgcactctactgctcggtgtgccaaaactgtgcggactactacaacggcagtgtcaccagcacaaccaacacgacgaccaccacatcatccgccagttgcccactgtgcagtgaggacgagggcatgattgcccccacacacgactcgtcctcgctcgactgtcccatatgtaatggccgcattgcttccggcgccgaagaaggcaagcaatccgaaatggatcgacggccaggtaatctaaggattcctgtcgaatggtatccggtttacctggctggcggcgtttgttccgtgcacgtgttacatgtcgccgccatcaagccacatactcctaccgcccggcggccgtccgccagccactcccagcagcatcccggccggcagcagcagcggagggagccacagccaccaggggtctccggccaccaactcgatgtcgcatcacaaacggagccagtcgttcaaccaccatctcagctacaatcagtacacgcccactcagcctccaccacatcatctgcatccaccacaaccaccaagtctgccaagtcatctgggggcatccggccccagatcaagttcagcccagacaccaaacagcaagacagcagctccactccaggcgtcatccatggacgccagtccagcaattcaggcagcggcagcagcagcggcggcagcggtgggaatgggggtgccaagcgcaaggaaaggaagcacaaaggctgcctgcgacccacgccgccgttgcgacccagtttattgaatgccaccagcggatcgggaagtggcagcggtggcagcggtggcggcggcagcagctccagcaatgccctggccagctactgcagcggaaggaagaaccagcccacctatgaggaggacgccctggtgctccgggttttcgaggcctactgtgccgcctatcagaacaatgccaggaacaccatccactcggccttgcaaccctggaccccgtgtctgcccatccgcggtggcaagctgaaaacgagcaaaaccttctcgacctccaatccacagctgcctttcatagccaatgtcggcaactcagcctacctcaatcagcaccagcagcagcatctgcagcagcagcacctgcagcagcaacacttgcagcagcaacatcttgcccagcagcaaccaggtcgtcagcactccgccggcagtttgaactcctcatttatttggcgcgaggcgagcccgaacaacttcaacctatactccagttcggtgtcctcctcgctgaatgcgacacctgcccaacgctactccttatccggaactgcgggaggatcgacgtccatcaaggactaccagagagcgctctccgaggagagggcaaccagaaagtctctgaatcgccttaaaagtggctttggttcgggctacgacaatgtgtgtacatcacctctgctgccgaggaaaaacaaaccggcaccaaagttggtggcccagcagtcgtatcagagatccccgggaaacgccacagccaccactatagtgaagccgaatccgccaggacacccaggactttacgatcgccgcttgaaccgctcctttgagacctccacttcgcaccgctatgccgggtatggagcgggctacttgatgaattgcggcggagccttgcggaccagtacgctccagaggagcactccgcaactggccggtggtgaaagatccgatgacagcgatgtggagcgggaactgctgcggggtaatggagctgggcccacggccagtttggaacttaatcccgatggcagcaaacggcagtcgggcagctggtgttgcggtaattttgtgatgaagcagtggcgcaagatcaaccatgtttga

SEQ ID NO: 42273 - protein, 1333 aa, DROSOPHILA
MGIKRQLSNLSNSSLGHLNAAHLSQHLDSRGYCTRFSLCAYYSSPPCHVRPLRVTLPPSNYPATAPYANLSAHFARLVKGGGLRSAIVKMLLYPQARQSIDLKRIALRKRRCHKASAKLKDLNTNQDSGQSELERQDAIELPTDSESYDDDFEDDFLHSCDSDPFEYVQFYQNKRNDSMCNSTGTFVDHGTGARRHCSSINLIKLDSADTDEVLALNELKKESLVIGSRALRALARKSTTRNSSVHTSTATLELGVGGSITNCVEEEPILKVKPSFSLQQQSSDASSIFAARLGGAFTACENLASMPDDLSRESSIQEPPTPLPASPTERHSMPTIFVGNRFNHSKNTEVYVPTWRDRQEMQNQSVDAKQDEELHSSSIDLPAACLSAPDKLQAELLYNYDEILEKPLQLHRELTPFPGHNLNSDKRVSHKSDSPSTGNAKTDPNLATRSSSTTELCIDTTSKKRTTPSERSRDSIRRCISYQFLQMSNRPPPPPPPRRDPDLHLDTKCRCCENSQCPSPRSSDSGMAGSCTITSPDPPNPESYFPMEAAGHDMLDNVEPERFDVCGMFREKFLTPEATQDVVDLSEEQPQLSDEPTTPTNRKEEPTCITSAQVQVNTRSIFLPSSSSMDETNRNVPANNILFSSSSADQLEPQATFRSGMYAHWWKKERLPPEVVRGIAHAYNKSLPSKDSKDSGSVCSSCFCSLGASGYSEGALYCSVCQNCADYYNGSVTSTTNTTTTTSSASCPLCSEDEGMIAPTHDSSSLDCPICNGRIASGAEEGKQSEMDRRPGNLRIPVEWYPVYLAGGVCSVHVLHVAAIKPHTPTARRPSASHSQQHPGRQQQRREPQPPGVSGHQLDVASQTEPVVQPPSQLQSVHAHSASTTSSASTTTTKSAKSSGGIRPQIKFSPDTKQQDSSSTPGVIHGRQSSNSGSGSSSGGSGGNGGAKRKERKHKGCLRPTPPLRPSLLNATSGSGSGSGGSGGGGSSSSNALASYCSGRKNQPTYEEDALVLRVFEAYCAAYQNNARNTIHSALQPWTPCLPIRGGKLKTSKTFSTSNPQLPFIANVGNSAYLNQHQQQHLQQQHLQQQHLQQQHLAQQQPGRQHSAGSLNSSFIWREASPNNFNLYSSSVSSSLNATPAQRYSLSGTAGGSTSIKDYQRALSEERATRKSLNRLKSGFGSGYDNVCTSPLLPRKNKPAPKLVAQQSYQRSPGNATATTIVKPNPPGHPGLYDRRLNRSFETSTSHRYAGYGAGYLMNCGGALRTSTLQRSTPQLAGGERSDDSDVERELLRGNGAGPTASLELNPDGSKRQSGSWCCGNFVMKQWRKINHV

SEQ ID NO: 42274 - DNA, 2919 bp, DROSOPHILA
gcagaaactggcaccaaccactgagaggaaccagggcgattggtcgcccaccggaggcattggcctgccccagccggacaaccgcgagtacaagcagaatggagcgccggagaattgtctcgccctgctgaatcagttctacaacgatggcgtaaactggcacgatgtggcatgccatcacaagaagagcttcgtctgcgaggagaacgatgctctgctgaagtatgtgcgctacacgaaccccaatctgcgcatctaagaggatcgcgatcaggatcagaatccgaatgcgaatgtgggctggcggaaggaccagcgacactctccaagtaaaaccaaaaatgatatttcccaaatcggcagcgggaacgatgatcgatgtcaactatatgtctaatctccgattgtctttgaatgcaaagttttctggccaaattgctgcatgatatacttacttatgaaccctatcctggtaaccaccttccaattctctgcgctctgttctgtctcatcaactagtttaattcttaattttgtattaatttatgattttctttaattataataaaagattcgaaacgattttgataagtggacaacggcattatttatttttttgttaatttgatatagcattgaacgtttaaattgatttatttaaggatattatgatagaatcataaatacctcttttccagggtagaggttagatattaataaatgctttttattaaatctacagatcctaagaaccctctttcaaattgtatgatattgttcagcgctgcagatatgaatataaatctgttccgagttttgttttccatacgatgaaataattgtacaaatttgaattataaaaaccaaaaaaaagttctgtttcaagctgagccatttgaagtataacacaagagaaaatgctacagtcgagtttcccgactaccagatatccgttactcaagtagtgggatttttctgggatatctatagattgggaaatacatacatacattgttttattcaacctttaaaaaaataaagccacaaaataaagtgtttcgaacttgaaattctgacgccaagaagtatgctatgattttgatagtagataagctttagtatcttatgcgttttgtatattacgatcatgaaatgaacggtgaaaactagtacatgcacacaattttgatgagtgattgttgagaacgaaagattgaatgaaaatgaaaaccctttttttttgggcaacactagaacatctgggacagtttcaccagatccaagagggaataaaatggcttctgtttggaatctcgctcgtgactcttaaccggaatgtcctgaagtaaatttggttccctgctcgcccgacatttgtccagcacccgttcaaactccgccagtgcgaaatcttgagtggatgacgctctcttcggatcaatagtctccagtatggcctcccactgggcccgctgcggcttgatgactatccctgcacctttgtcggctgcattaatggtggccactgctgcaccggctccttcaatcatggccagcaccagacagcccaccagagcactgttggccatggcccgaatgccattacgggctgccaatatcccaccagtggccgctccactgagtatcgagttccaggcatcctccctctggcgatagtggaccagggcgcaatccactgtgctgaaagtggcaccccaaacggcaaagctgccggcaatggacggcgttctcatcttcaccaaatcaatgccaccataaagtctgcgctgcaatccggtaggagcgttacggaaacccttgaggaactcgaacagcgaaccaccgatggtgcccatcatgaaggcacatccgcaatcctccacaatcctaatgggacacggctggcgattgtactccatggccttgacttactatatcaaaacctttgggtatactaatattcttcaagtggcttcaaatcaaaaacttgtgttttggaaatagacttttgagtaaacataatacgaagtgtttgggatgctgacgtttgcgtcctttctagatgtttacaattttatgatattaaatttgtatttcaaaaaacggattaaactttaaaagtgaattttttttatttaactattgaaatgtctatcgaaatccagcccagtcttaatctttaaatatatagttttttcttgataaccgaataataggtgttttatcagtatttcgggttcatatattcagttatcgaagtatttgcggaactcctggcaaccagcccagttttcctcccaaccgggagtcagtttcttggcattctcgtaccaacgtgccacattggcataccgcttgaaatcgaagccagccacatcgaaagtggaaacggtggccagaaaggcaatatccgccaagctataatcccctccagcgctgtaggtctgcccctccaggaatgtgtttaggaattcgaaggccacttcgatcttcttgtagttctcctcattggcgggcttctttaggaaaatctgcggataatagtactcggagaagctcttatacagcgtacccatgtcgaagtacaggcgctgattgatcaacgcctgcttttgcacatccttggggaagagcttgtcgtccttgccgtacttctccaccagataaaccataatcgcccgcgactcccacaaagcaaatccatggtcgtgcagcgtggggatcgtgtgctgcggattgattttcaggtattccggcgtgaattgctccctagctcgggtgttgataatggtcttcttatcgaactccacacccagtgccttggctgtcatcagaacagagcggcagggagcagatccgggtctatagtataaatccatcttacgctatctcactttctgaagggatctctggaaactg

SEQ ID NO: 42275 - DNA, 919 bp, DROSOPHILA
atggagtacaatcgccagccgtgtcccattaggattgtggaggattgcggatgtgccttcatgatgggcaccatcggtggttcgctgttcgagttcctcaagggtttccgtaacgctcctaccggattgcagcgcagactttatggtggcattgatttggtgaagatgagaacgccgtccattgccggcagctttgccgtttggggtgccactttcagcacagtggattgcgccctggtccactatcgccagagggaggatgcctggaactcgatactcagtggagcggccactggtgggatattggcagcccgtaatggcattcgggccatggccaacagtgctctggtgggctgtctggtgctggccatgattgaaggagccggtgcagcagtggccaccattaatgcagccgacaaaggtgcagggatagtcatcaagccgcagcgggcccagtgggaggccatactggagactattgatccgaagagagcgtcatccactcaagatttcgcactggcggagtttgaacgggtgctggacaaatgtcgggcgagcagggaaccaaatttacttcaggacattccggttaagagtcacgagcgagattccaaacagaagccattttattccctcttggatctggtgaaactgtcccagatgttctagtgttgcccaaaaaaaaagggttttcattttcattcaatctttcgttctcaacaatcactcatcaaaattgtgtgcatgtactagttttcaccgttcatttcatgatcgtaatatacaaaacgcataagatactaaagcttatctactatcaaaatcatagcatacttcttggcgtcagaatttcaagttcgaaacactttattttgtggctttatttttttaaaggttgaataaaacaatgtatgtatgt

SEQ ID NO: 42276 - protein, 222 aa, DROSOPHILA
MEYNRQPCPIRIVEDCGCAFMMGTIGGSLFEFLKGFRNAPTGLQRRLYGGIDLVKMRTPSIAGSFAVWGATFSTVDCALVHYRQREDAWNSILSGAATGGILAARNGIRAMANSALVGCLVLAMIEGAGAAVATINAADKGAGIVIKPQRAQWEAILETIDPKRASSTQDFALAEFERVLDKCRASREPNLLQDIPVKSHERDSKQKPFYSLLDLVKLSQMF

SEQ ID NO: 42277 - DNA, 39159 bp, DROSOPHILA
taaaccaatatatgccaccaattgagaacacggtgttttccttgcagttgggtgcagccgtcaggccacctttttatttcttcttatctcttcgagtagcagaaacggttctgcccgcttaacctctacagagtgtctaatcttacctaaatactgcgactgcgccgccgtcgacagcggcagaagagcagcgtatatatatatgtataagagagagagagagagagcttatgcgcatatatggccagcggccagcgtggggatgctgacttagcttaaagcataaatgggtgatcttatatcacgctcacttgagacatttatttatgcaatgcaactaagtgttgctgtgtacttataggtacagtgtaccctcgatatatgcacatactacaatatattcttgtaatcaatgtttatattatgtaaatcagctgtcgctccccaaaaattccttaattccaattagaagacaacgaaaaaatttctctttatttacgaataaaaattgtccctcaactccaattggaacggctgatccgtcaacattttagtcggcaacactttagtctgcaacatttgggaatgttgcatcatcttgttgctatgcatgtttccacggaaaaagagagtatatcataacaagagaccattcacttttttcgttttgaagcaacaaatttgaaaagagaaaactttatgtttttcccgcgggcttgtttgttttttttttctcgctctccgtcgaattgactctacattttgatgtgatcttattattaggtgaatcagctgtcttcaaaagaacagttttaattaaaaaaaaaatccctcaattccaattcaaatttcatttagaacacaacgaagatatttctcttcttgtacgaacaaaatgctctcttaactcaagttggaacggccgttccggcaacatttaagttggtaacattgttgcatgctgcatgcatttgagcacaagagtgtcatttacgattagcaactcgcggcgaacggacgtgtgtaaaaaatagccggtgagaaaaaacgaagtgcgattgccgaagaaaaacagagagatttcaaataataaagaaatgcaaatgaaacagaagaaaataaaaataaagcaaagtgcgtgatttccatctcctcagtgttgtgaaatttctagcagagtctaacggcgatttgcgaatgccgacttaagaagtgcgaaaacaaaaacgtgacgccagtttaaaatattctcaagcgaaaatcatgtgttttttgttataccctgtgctttgtgtttaatgtagctgacgacaaacaaaatattagaatcgtgtacgtcgggaatccgaattccatcccctcgtgttgtgttattattgtattaaagtttcctttgccatttaccacacacaacacagaaaaacaacaacaacaaaactaaaccaaaatcgaaccaaaaacaaaccgcgaattttgcaggttagcccacccgaaagaggcaaaaaaatcaattatatgttggccagtgccgggtttgcagtggaatcgggttgaaagccatcgatagccacacacgcccacacacataatgacggagcaccaggccgaggagcaggcggacacgccgcccaccaaggtcaaggccacgcccacacccaccccgagtggaaagttcaaggacgcgaaggaagacgccttcctgtccacatcgccggacagcgccaacggcgatgcccaacacaagctgccagcggaccagctggccatgtcctccagtgcgcatccccagcaggcgggccaagcccgcccgctcatcctgcaagccttccaccgctgctcctcgccagaacagtgcgtcacgctgcacgacatcctggactcctttaaggcgccgctctccgaggaccaggcctgggccctgatccaccagttcgccgggctctaccaccaggtggccgtacaagcgcacacctgtgccgcggactacgaggccgccctgcccaccggattcgagctgcacttccatcgcgacggcagcgtccacttctccggcccggatcagctgacgcctaaggagcaactgcagcaggagcagatccccctccccccgcagcacgacgtgattgtggatcagccggaccacagcgccagcagcagcggcgacagcagcgtcatcaacagaggtaagcagaccgacctactgaaaaatcaatatgcatacatatttctcacggctacagttagcggaaattaatattcctgcagtttatgccagttgtttaattaacggaaattaacttagtatgaatcttctattccttgaatttttaatttattattttttaaatcatgctgaaaatatttgaactaaaattgatctatagtcatagttattaatgttataacatttatttattaacgtgctgcacacaactggcaatctttagaatctatatagaagtggaaatgttcaatacaacattgatcaactaacaatttggattgataacctaatgaacctgccaaccccaaatgacattttaatgtcgtttttccttacaattatagtaacatgttttaatcacaaataatttattgtacattgcacgcaaatgcaatttgactacctttaagctagcaacccgtgtatattctttcgactttgtgttaagttctgtatcctttgagcaatatttcctattattttttatgagtcttcctaaagatatatatatagtttatgtgtatttcggcccgtcagaggtcagttgggtgttgacttcagatgcggaactgtaacagtgatgaaaactggggctgtgattagctgggccggaaaaccggttgcgctgatgcctctccgaatgctgaggggtctttgtcttttcggcaaacgctttcattttcagttaataagccacagttaacttctttctctcggccttttattttcggacatctgccgtgatgtgggtttccgtgtgccatccatctgactattggcatcgcccggccatcgccagcggagtccccagcgctttccaaacaaacaacccacactatccgccatccgatgatgacctctgcatttaagttatgcagccagccagctttgattggggttttccccacttctgccttctgtctgattgcgtgctggcttgggaaagtgtaaacggcgactcccatgaagaaggtaccatcccagtaccctatcagcagtgtttttcactttcttttgtagctcggagagcacaagtatcactggaagaaaggcaggtcatgttcggattgggcagaagattgaacgcttttccttgccgcaatacaatcgaatccaaatctacgaaagtagattttttccagtgtaacgatcacagcctttcctttcggcattccccctgcattcgctgtaattgatggggggatactttttcgcctctcgatctctgaatctacagaacgtgtctgagtctgtctcgcagctaattgtttaatcattcgtctgcgcggggactgtcaaaatacaggtcggtaatctatcgacttttagataagccacgttaattggaaaatgcgtttctgagtgggtagtgatgggaatcttggatttcgttctcctaggtggcccttaatgtgactcagctcagcttttggtctgcagcattaactgcattccattgcatctttcttcgtatgggcctgtctatctctatttggccaggccaactctgcctatagccggcttttgtatcagcgtggccaattagttagctcttatagacaattagccagttacatgggtaatcttaagggcacgcagatacaggaagttacagtattaattgaactgtgtaactcggaggtgaaggaactatagatggctgataatgctgtaggaagtcctaggggattttaaaacccatttcagtatactacttaaaattcagaaattttcttttataaataacttaaaaaatgttcttagctcttaaacctctgtaattaaaggtctgtgatcgtcaatttcttatctaaattcacacgtaacctttgtttatgcttatcatcagaactttcctcgggccaaacagagatcaccttgtaacaccttaattgccgctaattcagccgctaaaatccaagccattaggtgagatatcgaaaggttttggcccgggaacctcgagaaccgccagcgggggcaattagtctgctcaaacaagttattacagatgggagacggaccagacgggtggatgccatcagattcagcaccttctaatggctttcggtcggctgcttctgtgttatccgaagcaaatacatcaaatcggtggaacgttctcgcaggttacattgttgctgtgcgggctttgaacttgccgcatcgatttcgatttcggtctcgatttccgttggtctctggctgaaaatcgcgctccatcgcctcctgacaaccgcatccacgggcgcagcgaatcattgattgtgtcgaattcggctccagaccctcggaggccatcggaaccctcgggagcacccgcgaccatggaaatcggggcgtgggagacggagcttttgatgggaaaacgtcggcggcgccgtcgggtcgccgcgccctctggcgcctcgattaggcgcgcagcagtttccacagagttttccacattttcacgggcgcaccgataaaattggcgcttgaatctgtcaacacacaaactcgccattacgtttttcagcaggctcgcagaaaattgggaaatggcttgcgccagcaggtgttcgcttattccaaattttccactggaaaagtcgcccacgtattttgtggagccttctccccaaggtcatgggtcatgcgcagttcggaaaaatcggaaaaccggaaaacaggaaaatcgtaagcatagtagcataggaaaaatggaaagggaacatttgttgcggtaggttctcttcttccaagtcagctgttgattgtgttttactctgtttattttcgccgcttttcatttgattcatctcacttaatttgattcttccgtttccaaacttatttcactcgaagtaatcaaagagatcggaaagaaagctagaaaaaatccctttttggcctcgaatcatccgcttgggtgatgatatgttattttcatgtctatgactttcttgttttcaccgacaatacaaacaactggccgctcaactggtttaatgtttaaataattacactaaaaattacccaaacaacggtcagcgaaaaatggcccgaaactaaaaaaaaaaaaaccaaacaaaattataacgaaactaaagctcagcagcaaattggtgcactttttgttgtccgttgtgtggaggaaaatgaagaaagactcttggaagtatctttaaatggtcggagggtaaattgttgctaatcttgggcttatctctttgtctggcaaagctttgggtggagtccaaatgaagagttaccaaatgataattgcaatgtgccgcctatttattaggcacttcagtgggctcaattagccattagagaggggcattttcagatggaggagttttgaaatggcttcaatttacgatgataaggtcaacgatttcttctctcaatgtttcgattagtggcagctaatttatagttccacagtttccacagaagctgagatattgactttgggaaaatgttttagctagccaccaaagttatttcacaaacgccaaacatttcgattttgcaaccttcgtaatccactcaaagtaacttggaattcgagaccatatattatgtttatttcggattaggtagctgtctgaaatgaatttattatcaagcggcagtaatagtttatgttttccaggggaccacaccacgtgctcttaggtttccgcgttggcttatattttttttgacacatcatagacccaaatttaattgccagctattgtgttgacgctccagttttgggacacaattaatataataattttttcataatgacaacaaatgacataagcacgacgacgaacctgaaccaaatttcagagacccaaatgcggtgggctattttgtattttgtatttgtgtttttattttttgggcctctcctaaacttgtccacctgtgcagtttgcattcgagttacgaaatccgctgaccattggctgcattttgaaatggaaatactttgtgtcgccttcggacacagtcgtagatactcaatgcaagagacttgggttttgaaagtgcgtcgcagacccaataaatcagacgataatccaaattgtggcgcgcttttcctccgttgtgtggatgacacttgtggggtccattgagcggacacatttggggctcaaccgatccgattgaccctgaatcgcttgtttacgctccaaattataaataaattttgatgcaattaaacgcaatcgaaagcggcaaagtcgttgagtaaatgcgccccgatagagctatttttcgtattcctatcttatcgtttttgtaagtaaataaaacacctatatttcgccgcttaatgtatgtgctaaagtacatatataccaaatgtgtgtcgtcgagtggcagccatataaacagctttgacgcggaggtagtcaagaaaacttgctaaaaggtttgttaacccgtgtttccaacgaatgtgaactgtagaaatctgctccatgggaacctgactctcggatatgcagtagaacaagccaactgaaaagaaagtgttgataagctatattattgtactgtgtatacattagataagggtctatttatgggcatttacttaagctagggtcggtcattcttagcacttttgcagggaaatttagaagccttggatagaatttagtattatttaataaggggtggagtcatagattattgtagcttcaaacgaccttgttgggattggtcaagtacacaaaaaaataaggagatcccttgttttgtgtatccatgttcctttaaaagtggtttgtcagtggttatgtcggtttttcttcactgagctccgtttttaaataaaggtaatttatatacctccaaggtcagcaattattatcccagtcaatccaatccatttcagtctgcagataacccacatgcatctcattttctgcaccttctatcgcaatcgcctagccgtttaattgatgtattcacgagatacattcatcttcagccgccgatccaatttcgcttgacacatttactggggggcgtgggcgtctccggttggggtaattcaccttgatggcgattttccacgggccgcgatgactgcgcaggcgcaactaaactgtaatcgagactctcgctttctacgcggcttgataccgcgccttgatgactgtgaaattagacggcggactgcagattgcctccgaagactgaagattgaagactgaagactgaagactgtagactgtagactggggactgaagactgaagactgtggagcgggtggtgccatatcgctgttatcataaccgactaaccgaccgactgattgactgactgcggctcagtgaaaaactcgaatctctttcactttgcatatcgccggtgctgaaattacaatataaatttatgtacacggcatacgtatgaaagaaacaatctttaatcagcatttacgctttcatctttcacatttctcaaagagtggaaacagcaccagcaacactgccataaacaacaattgttgttggtccgccgcagcaacctgttgacgagtctgtttttttttgtgttttgtgctttgagatacagatacgcggggatagccggctatcttcagtgggtatttggcctgactttggcttcagctgcaaactattttaatttggtggcgaatttgcatagtctgcatatcttatgaatttgttcgtctatttgtctgcgttaatttggtatcggtggccataaacatacacacttatgctctttctctcgagatcacaaaagatgaaagcaagagtgacatttaaagcggttcatgcccaaaattgggaatcttttgtccccgccctttgtagggaactatattccagaccttatgcaatattaaatatacacacacgataattgaagaatggggatcatggatattgtggtttttggggctgtgttcggaatgccattcacttgattcggaatatctctggcaggaattgtttcgtcacagtggttacaatcggattgtgttaggtttttgtgggcactaagcgcttgtattgtgaatttccttatgatgtaaatgatgtaaaaaagcagccatcaatgaacgtccaaaacatagcctgggaatttggttggcaatatgggttttgagttaatgatctatggggtaatctttaagttaatgttatggcttacactatggaaaaatcagaaatatcgtctagaagtgtacacttaatgaggaaatttgaaagaaaattgtaacaaattgaagctcagtggcccaatgaaatagaccaaaacatattaacttgaataaaaaagaccaatttgattctgtttaaaattacaaagtttagttccgctcgattattgagtaaccactcgaaaaaccaacgcccgtaattacgttaattggcaactatctatcatttcctgatccattattcatccgcgcttattaattaatttataatttgaatgcagagacgcggcaggcacttaggtgtaaccaaaacgaagccgaaataaatcagaggagggggagcaaactcatcaacagctcattgcccgcatttgattgataaatactttaaatatgcccatagacgatgtaaaaatatgtacatatgtacatcgccacgtgtgtaacgattgccaaaggcattcggcgtctttaaattatgggttagaaacgaggttgaaaaggcagtggcaaaatatggtctttaaaatgccgacgattttaacgtttctaacgcctcaacaaatttcgccgcttctaattaattttgctcacaaatctgcatagatatcgtagtttttgcccagattatttatcaatttctataagatatatgcaaaccaaaagaaactcagtcagcgtgcggttgccgttgacttgcacatgactttcctgacattagaaagtaaattgccatgaggccacttggtcaaccatcaaagccatgcactccaccatccaccatcacctctaccacaaaatcccgcagcagcacatttataaaactttattatatagtttccagtgaacctgatgaaatgcaagtgggatgatgagattgccgcggccgtggcagccaaacaattggaagcctggctggccaagtgcttggctttattattattaattggattcgacgggaggaaagtccattgtctgaccctgagactgctcgccgtgtacttcgatgttttttcgcaattttccaatcggaaatgcaattttccccattcaatttcgaatgtccacgctttagagcggttccccggcaatctaatcttatcgaaatgggttcgttaatttctttctttggagcgagcaaagtgcacaacaccatcatgtgtataggaaagtaggatcccactctctttggtaaccaatgtcggttcgccaattaaccgacttcgaattgacgcattgaccgaccggtgattcattccaagataaggggcactgtgattttatacattttgccaccacctatagggccttgtgaaaatagacgaattgagactaaaaacaactagtatttaaatgtaatctacagaccttagctttgaccaagaattggttcatgcaattaccctttatttatggccatttagttaattgcttaaattcactaagccaatgccttagataatctaaactatttaacgcagatgaaaaatcatacaaaatatactgcctcaacatatggcgaataaactacagcagttataaattttaagtacttgccagatgtttgctgatcttctgattcggcatgaacttttaaattgtaacgatcgcaagctttttcaataacgctcaatcaaatgcacatgttcgcagtgaagaagcgttacggctgtcccataaatcaggcattaataaagcccaactttgcgcaaatttcgacagcattcgcagatggcagaggcattctttccatttgaaattctttgctaaatgtcaattaattataagctgaaagcgactgcctgcctgcctcgaagagttatatttgttatttaattattgagtcgcggcatgtcgtgtccgcgttggaattttgggatgaatttgcctaaaaccccaactcctggtcctcctcttcccccgaaaagttagctctttttgagtcatttcctgcgaatgtgatggacaaccacatcataatgatatcatgctgggcacttgagctcgtctcttattttcgtgtgcagccttttttgtaccattttttttttttttggtttatttccgaaaactgtgttctggttgtctgacccgctaacttcgttaacctgtagttaggtcgagagtttaatgcggaaccaacacaatggagggccaaagagctaagatcaaatgcccgcaattcatgggacttatgaatcacttcgggattgtataactttttattgcggtagaagtaaatcaggtaggaaactctaattgcgaagcttaggagcggaaaattaatttatttcgacattgaagcacgtgtaaataatacatatgattttatttggaaaaaaaaaggaaatgctattatttctgttgtaaactaaatatgcataaaactgaaagctccgtaaataacttcatgaatattccataaaactaacataccccactgtgttatctcagcgcagaatcaagttgattgcaataatatttgcctatgtgggtatttaaagttttgggtggcgtaccaaccggttggtcagtcagtcacgcttaataaattgcaaagtggaattgctgggccatgatatggggctactgactagccaccccccatcacttcacccctttctccctggcttccattgtcgcagcttgtaatgaaaagccggccggtcagccaatcaaaccaaaaaaaaaccaactcgagcaccttggcatgagcgtcgagtagcggcgctgctgagtcaactttttttttagttcgaaattgcatttaattgtttaacaaaatgccaggcgcgttatgtggcttatagagatatgagttataatacaattgctcggcttgtccattgacaattttccgccccgccccgccccattccacccagtcgccagtcagcgtcagtcagcaccacctgtcccagtcccgctcccagtaccgctcccgataccgctccctgtaccgccaactcaccgccaatccgccccggtatatctgactgtctgcacaacaagtttatgattgctgaacccgtttccactgacactggtatttgttatttctgttacaatttctgcccgcttttcagcccgtttttccccgcttttcccccttttatatgctcggggtttggccatcaagtgcggaagttgcggagctaagaaaactaaattgagactcgaaatgtttgcatatttttaaaatgcaattggaaaggtgaacaatgtctgctgttgtttggctttctgcttaattgcaattgactcgtttatgatttcccgctaactgtaaccgaatttattgattgcacttgcacaaagtcttttattaatttacaatatttaatcttccatttgtttactcaacagcgttcgacaacagcaatcaccaccaccaccatcaacatcatcacccgccgctcgtcgtctcgcatagaaaggtgagttcaacttcgattgattgagccacgagtatttcccggtgtttcaatcttgttctccggacttaaatggatcgtaaagatcgtttggagatcgttcacgtgtcggccagttgttggcgacaattaagtgccctcagattacagataagaattacggcctgtaaagtgaactcaaaatgagttcatttcgtggtcatgttgctgtcttgttacggttccggttcggacttaaattgagatctaatgatttatgatataagaaatgggttcttaccccgcagcggcgatttctaatcagaggggcggaagagttgaaacaagaacggatactaatatatagggtcgtaaaacgcgttgagtgtcgcttaaatagattagattttaactgcagtgcactaattaagcttagctctcaatcatctggttatattagggttatagtctttatcgtcttttcaaaaactaaagagaacgcaattagaatacaaatttaaatcggaatggaaaaaggatacttataaagatataggactgtcgattatggaaaagatatcatcgctttcctttgggttgttcgagagatttaggtgctgaatctatcgattggttatcgatagagctgagctcctcagtttctctgccatgccccactccgcttttcaatcagccccctaaaaatcccccacacgaactcctatctcgaaaggcccagagctgacatcaaattgaacaggccataaaacaaaatgagctacaaccagtaagacaagctccctagcataatgtgtgaaagtgttgacggcgcaacagcaccatcaacgattttatggcaattttagcagatgttcaacacatagccgcacatgcgaaagtgctgcccaaaaagagtaccacgaagaatgcactgtaaggtttcttcagttcccataggccaaaaactcgagagctacagaaaactacagaaaacgaggcaaagtgctgaggaaatgcgcaggcgcaacgccgaagaattcacatggtgatcgttagcaaccctgtgcggaggcaggcttggatctcagcgaggtaattaaatccgtgagcaactgcagccacaaacagggccaactgcattttgggcccaagaagatcgtaacatggaagcgccaagtttctccacgcctggaaactttaatgtatcttttagtttgcccctcgctgttgtttcttttcaccggccacaagctgcatactcaaactacatatatgtataacatagatgccgttttcaattaagtgtgcttgccgtaatgggtgtgtttgtgtgggaaatatgcatgtttcaccgctcgatggaggtcgttccttgggtgtactcgccatatattcattctacacaactcgcacaaggcaactccattgtgtccgcgcttcatgagaaattcccgaatgcattcttagagctacctttaaattcctataatttatgatcttagaaggccctatttaagtcggatagcatacattccttcataaatatgaaaatacggaggaaattcccttgtaaataagataaggttgcatttgcttacaataaacttataataatttgtatgcaatcttatggctaaaacaaaagagtccatatgaaatgatgctctgtactctgcatccaatgctgttaggtcttgaaaataaagttgtttcaatactatacttccatcttagctttttatgcagtcattaaaagataccttatgtaaaaggatcactaaaaatcgcagtcgacataggaaatatataccaattagcttggccaccccatcgtgagcccctaaattgcgatccactaaatcaagagtcgcgtcagcggccgaaacgagctgaaattggacaatattatacaacaattgcaaaaattacccaggggttggttgtcgctggtaaggttagtccgccccctcaaaaccgaaaggggcgttaaaagtgcgactgcaatgcgcaaaaatgttcatttgtttgtttaaagcaccgacaacaacaattgaaattgagtggaaaaaacaattgccggagaccaaagacttgagcgttaagagtgacagcgcgtgcagtgacattttccgctcgtaaatgcactttgggtatgtttgacctttgttttgggtccccagtcattcccatcgccaagttggggttatgcaattgcccaaaggacagaccaaagcgatgagatgcgatgcgatgcggaacttgtggcgcctatcatatgacaaaccagacatcatcatcatcattattgtcatcattgcatattatgcaaagtacaaaaatcgatgatcacatatatactggctaagcgcgcgagaggtatcaaagagatatgtatgtttatagatgcagatacaaattgcagctgaaaggcagcccactaaccgcagaagacttcatcgcttttccagacccgaactcgtgatctgcagctagctgtgcctggctatggctagttggaatgactaacaagctgactaactgacaaaatgcctgactgactaaatgacaggccgtctgcctttcggggatgcggactaggaagtcgtcggttggcgaatttctgcggtctgcccagcccactaaggtcgcctagaaatctgttatccataccccagatagtgagtcaatcggggatgcgcttcgccacactccactgctccactgggcaaacggctgaataaaaccttcgaaagtattatacatacccccacaccatccaatatcttccataagtttggctaagggcttggccagctccatttgttgcgcttgcattgccataaatgggttttcgtagagttgaactttgcagtgcaaagtaggggcacttctgtaattggtttatagatttccgatattgttgttgggtgcgccaccaacccgagggaatcgaagtcggagtccaagtcggaaatcggtggctttggcggctttttcggggccgccaaataggattacttcgcttgacaggcggctttaatatttccttttattggtttatacgggcgaattgctaaatattccgaatagggcagggcataattaagctgggcgagtttaatgttgccggaagacgattccggattaatgcgcttacattttcgtgaaggtcgtgttgtgtaactagcaccatttcaatattttcccaaccatttgatctttctaaactactatctcataagcgacatggaattactaaatctaattgacttcgttcacgtgatacaatgaaaagtagttctagtcaaataacaaattactctgccttattttacaacccaaggctttttgctatctggtgactaagcatcccacaatctaattccctttaaatgacgcaaggttgagtaatatacttaatatacgctttaaaacccttgattatcatctctttgccttgttttccacctccatagcgtattctcccgcctaaagtccaaattcattacacaaaaaaaaaaacaattatttggttatgaaaccgcttttggttgtcagggctaaaagtctcgtgcaaagagttttcgtatctccaaaatagataaccacacgatgtgcagaagccgtggcccaaatatcatagatatcgggtgacacacacttcgtaggccagtataatttaatgcgcaacttacttcaatttcattctgattgggccggaaagcgagtttttaacgtctggacatcgatttgggataaatattttcgaagtgaagtcaacgccgtgcgatgagcaattaccaatgcaaactgcggtgcgagatgaaggtttgatgattacgccgagttaatattaaaaaagcgtgcaaattgtttacagtaaatattatgcataaaataaggctctcgggtttcgttcctttccgcctcgaaactctttttcttcttcttgttttgctttgaaaaattaaacgaaataagtcatcgctttttcagagcgtgaacagctgctggcctacctgttccatttaactggcacgcccgtacttttatgggttcagttcgtcccggtacattcgtatgccttatgctccagtagcaacaacatcggcagcaacaagcaacagttgctgccacttccacttgcaactttggttgctgctgctgccgccgttggccagctccaaaaacaatgagttgcctctggatggcgacttggttgagtgcctcgccgtttgctttatgcttcgtctggttctctggttttggctctggttctctgactccggctacaaccacgactctggatatgactagctgctatagctacgcatttataataggcgaaacatggcgcagtgggacgagagtagctgaaaaccatgctaacacctttagtgtccaatgctaaaagggtatatagttcatacatccgaaatgtaaaaaaaaagtagaacaattataagtctacttagttgccatcaatccatataccccattttaaattccccccgaatttctcctacaaaccaaacactttgtcccactgtgccactcgacgcctgttgctagttcgccttggtgacggcacagacgcatcgctccatggcccattgttctagggaatcaatcaatggatggcaggcacagcaccagaactgccaagagatcgggtatgggtatcgtaggggatcgcatggggatcacatgggatggggatgatgaccatgttgatgacgatgacaacgcgcgcacgacgtcaacataaaagtgtcgatcaactaaacgttctcgggcctccggatgaagacgatggccgaagtgggagtggaatttgaaatggtatatatgggatatgggatacggaggaaaagtttgagaggcagccaagaggcaaaaacttcatggctcgacggagctggtgctacgggattgtctttggagctgattctatggagcaattgtattcacgagcgtctgtaattgcatgcaccgccgtgctttgcccataaatacactgagcgaaattagaagttgaagtgagctgtttacttataagcctttgtatactacacattattatccgttattatccaaattaaaagagtacttcagattcgttgtgaagtgtgtatcgtgaatatatattttttttggtcaggatcgctattcgatcaagcgatctttgtcttgctttctttttatgatctatctacataccaaatgtaactttaagttggtttaagtctcactatttaaatagttttcttcgattgaggacaatatgttatgttagattatatgttttgtatggtagaggtgcgatttgacaatatattttttacgtcgtcaacataaaagttcttatagaatttacatttctcaaaaaaactacaacaaatcaacggcaaacattaaattgtatttcccattttttttaaaactgcactttccacagacttcaatctttcgggcgcctaaacaaacattaagcatctgaattgaatgcacgtcaatatttgacgcctgaggccgctccacctcctcctcgtcgctgaccgttaggcaaacaatgaacaattcaagaacctaaaatccacaaggaacccctcaagtgggggccacactcgaaattagaataaatgcaaacgacttggactaacacttgggatttctctgtgggaatgaagccataattcgtggctctcgctggacgaaacccaacccattgaaacccatttctggggctgccagttcgtggcacatggacgtgataaaggactcattaaaacatcacttcaatgggccggcccagcagcctccaaagacgagatgcagttggggtccaggccacggacacggacacagatacagatacacaccaatgccaggcactcacttgttcaattgctctgccactttaagacccccaaaacaacactccaatagcgaaccagtctttttttttttgataccctttggctgtttgggtggtaggaataggtgggctattttaaatgttacgaaaattattaacgaaagttgggcttaacctccactctcttgaatcttttgaaagcatagttgaaaattacgttacctttgattattcttgaaaagctaaccaaatagacccaggccacaggctatacttattgcaatgtctatgtggatacacaaataacttactggtcctgttaatagatatattttctcctaaatgatgagtatcaggaattcgccaacctcttctatattttgtgcaaaatggaaagaagacgccaaacaagttgctggttcacttgggagagtaacagttacttttccaacatacatacatatataaacggatatgtacgtgcggcatatacgtatatacctgtatctatctaatttttgggacctgcctgcacatagaggagttgctgctggcgtccagtttggagcccgtcatgggaaacctctggcaactggttgccagtcacgagttggtcccggcactagccattctattctatttgccagctccgagttctcttggccaggctcgattcataggcacacttgcaatttagtggcattaggggtgtagtggttgccataaccgctgcacagggagaaataaattgcattcacgttcagatatgttttatgcactgaaaaggaagtagtattcacttcgaaaattcaatcatacatgtctttaatctgtatgtatgcctcttgtggctcgtggtttcgatgttaccatttttcgtgttttatgtcgcagataatggcaatattataaagatgttaagcccgtttttatgaccgattttagtcgtatattttcgcgacgtgttcgcggtcgtttgatttcgaggggcagttgagttcagagcggttcgactgagttctgcagtcatgtgcgagtatttcaatttctgttttggtccgccggtggtaatacgtacggtacttgagccaattacccaattaaacgccagcgttttgtgctatctcatcgtcgccatcaataccagtatgatcaccaccccctctggatgccctctgtatggccgacccgatccgcagatgcccaaatattgatatatagcgttttgtaggctatggccccttggcagttctttgattcgagtcatgttctagaggcgagtacaattagcgttttgtttcggttccgttataatgctgttagggattacgccccacctggctccccaaaatccgaaaacttgtttatcgattactatcgatgtgttgtccgtcggtctgttgtgacgctgggatcttgggtctcagtttttgatattgacggccgatctgctgccttttgctgcccattggatgctgtagggctttgatcgcaatctccgatctctccttctaagcctgtcttcaaaagatactcagtcttctgtctgtgtgctcgagaaggtattatttctaggtggcctggtccgatcttgggaccagagaacttaccggaactgcactaagcgttttgattgaggcattcgacggtcgatgctgatggatgggttgggtaaactggggcgaaattggcgaaataggttcccatgcatacatgagcacacgaaggcgaggagcaaatgtctttaatctgtacttcattttaaaatatttattatcaatagaaagaaaaattaaaattaacttattggatcgccctcaatgagtcataatatgccagttgctctaggggcttcccggtatctcgcgctgtgccccacattctcaactccgtaattgccttatcagttcgcaacagatcgcatacttgcctctttcgttcacttttcaggccaaaagtatgtgtatttatggtatcagcaaagaaagaaaataatgggaaattattgttattcacaattttagacgttgcgaatcgtgtgaattgccgttttctacatgaacataaacaataattgtagcaccagcatagctatatcttgtacatagatttattatatatatacatatatatatgtatatagaaaattaacccagttcgcacgtctatgccgaaacaaacaaaagtttgcgaggcaaacgagtcgctggcaacaaaagacaagaaaacgacaaaagcaccagactcacctgaaatccacaaggcaacatgcacctcaaaaatgaggtgggcgaaaggggaaaggtgggtggacggtggaaccacctgcctgataatcatttcccctgctaattgcaggcggtcttggtaaaatgtgcaaatattatttcaagacagttacaaataccgagccgcactcattcgcacttaagtccccgctcatattcacactaccactcgcattcacattcatttcgattctcattcccattcactttcccctgccttttttgagtgtggggacgacaccttgctgataagctgagaacgcaattattagatgacatgcgacttgtgtggtgcactgtaaaaatttgtatacattttattatggtcttataaacggaacctaatgaataacaacagaatattactttataaaataaaacaaatgcatatgcatacatatttctggaaatatttctgcttagaataccaaacctttccccctgtttaccgctcatattcataattctctctgggctgtgtttcgagtcttgtcttgaatttgggtcaaacatgcatactcattggcctcccctgccatctccttatcacaaatgatccccccatgatgccccatgcccccatgcccacctgtcgcccctgtcatccatctcggatgcctggcagagaaactggaaaatctaaaattgtataacctgctcccagccggccgagatgtggtttggtttccttcaacccactggcctgtgggccacagtgggtcttggtcgcgggcaggcagttggtcccgtgtatctcagtatcagcggccataaatttcagccactttgatcatgccacatcgaatgtaaagtgcttaatggacccgaaacagttgaccgggcttagcaaacaaaaataggagaacgagaagcaaaaagcgagccttttgtgtgcgtggcacaaaattgcattgtaatttacaaaaatatttccagttctcattgtctctttctgcgactttttatttattttacttattcttgtttttgtgagctctgttccctagagattttaatcgttgtcgccagcgtcgccttgtcaacgttgttcagccagccccccaatccctcctagaaaaacgaaaaaagagttccgaccgttttatgctgctttacattggcgtcgcatttttttccgctgttgctgttgcagttgctgctgcgatgttgctgctgccaacattgatcacgactgaccagatagcctggagaagtggccaagtcgagagctacttgtgcgccggctgccgattgtcgtttgcctatatatatgctacatccctctatatatatatatatatacgtatttatacaaggcattctttctatggaaacaattgcataaaatgtgaatccttatagcgacagccagcgtctaggaaatggtcaagtcaagtgggtagatcacagaaaacagtaggagatcgcagactcgagactgcagaagaatggtcacgagcaaagagtggtggcagatggccagacaaggagtttatgattcccccagatgcttaggagacaatgggtagtcataatggaggattgcaagaagtccgtacataaatatatcaaagtgaagtgcgcgaaagtttcttgtctgagaaaagtggtcttggttcgagatatattagaactattagatatcctagtaacagtttccctgcctagaatgtatccataaggatagcttccatgataataggcattttaaatagttattgtctctttacacattagttttaatgttacttccaaaagagtctagcctttcaaacactcctgattatcgatttgaccttttgttaatctactttcatgcacttgaacggacagtcggcaattacagctgcgcccccaagtgcattcaaatattcacacctcaccagacagccctacttccctcccccgattaatgtcgcctgactcagcagctcctgcttataaaacaatgtccaaactggccaaaaaaaaaaaagaaatagccaggcagtagccgatgagaaccaacaaagcgagtacagtaaatcctcaacgtggaggtcaggctaaaggttaaactgactagattgacaacgatgggaggtggagtgggtggagtggagaccctttgttcgccgaaaaccgaaatggaactttggcaactggcttactatataattgccgcattgcatgtccgtggtttcaactttgatattagcccgagttcggggagcagtttcttttagttgttgtctttcgctgagaatcgtcggattgggaacaggcgcaccctcgacaaagacagactcacttatttagactgatggtatatgcaaagtggggaaagaaatagccacgaagcggttgcctttggcatattacaccttgcctcactacggttcaccgtccacaatgcacattccgaatccaaagatattcccagttctgttctctctgctaattgcatgggaaaattcacaagacaagactgtggttcctgcttaaaagtcgcctgatttgtacctatataggctgtcattatactcttaattgctgggcgtgatcattagttggcgacctcgccttctctcagcctaatgatgccaacttctataaattttaatagacatttttctctgaggaacttccttaagtataagaactatcccatgttcctaaaaaaaatctataaaatgaatcaattattgcatttctggcatttatgtcatttaatattgatgtgacattaaaccataaaacaccaaatagcatttactattttacaatcggattgtttgtatttgttcggtctttggatttgtttttccaccactacactttatatcccacttgcgctcacttgacttccacctcttccataattttcccattaattatgtctctcaaccttcaacgcctgcaactgcaactgcaactgcaactgctgcggtgcaacaggcattgcagctgcaattcttcggcaaatgatgtaagggtctcctactccacggaggggcaaaaacgctggaagcgtttagctgacatttgttgtcaacctcttcagtggtgcagagccccgggtggaaatgccactcggcactgcatccactgcttccactgcttccactgcacagctgtcacaatgttttatcatttaatttccacgataaaaacaaatccatgtgaacgtggctgagaaaatgtgccataatgtgcataaagtgtgtgggcggcgccggcagcccacgcgcagatttggatgcggatcgagattgagattgagattgggccggcgttgaaggtgaagatgaagatgaagacgagttcactggctggtcttaaaataacgccagcgaaatattatttaacggctttggcttcttcggcttggatgttcggatgtttggatgctttaacaccttgtagctttttcggcaagtgatttcgccaacgccaaagtgaaagtgaaacaacagctgacactgcacttggctgtttgaagttggcgctgctcgttgcctgctgcacctgaactctacaacttcccgaacaccaattacatataaatatatatgtatacagatatatatatatatatattttttttctgctttccaacgaagctccgtcaacttcaaactccaattagagtgtcggtttaatgaactgctgtctgaacaaggcacacggaatccccgactcgcagacttcagggcttcggggggttaactgcattacacgctgcacaattttttatggctcatcggccttaaccttcggccccaacttcaactgcattttgctggcggcatggcatgccattttttcatagccctctaattattatatttaatatttgtccgtttaatcccattacagattatcagcgaactggcggaaatcgtctacaccgccttggattacaatctgccggaggacgaggagtgccaagtgtcacaggagctggagaatctgttcaactttatgacggcagatggtgagtatggattctcgggaatgagctatagatttggcccataatcatcttagtatattaaggtcaagcttcaagtattatgagataaaagaacattccgtattgacactattttcttcaaatggtgaaatcgcgttgtactcgtttctttgtgactcagatatacatatactatgtagcttagaacagcaattaaatctctcaataaagttcccaatctgagctcagtttttttatatttaggcagggactttcttaaaccaaaagccccgtttatcgggcttcacaagcgaaaacaagatgaaggttaaatgaggcggcgtgccatgaatcacgtattctttgtgatacatttaataaaaataattataatacaataaactccgaaccttatagagctgattggatcttgttcattgcagagacagacgacgattgcattgacgagggcatcgacgagggcgacaagcgctgggacgacgaatccgaggaggagcgcaacgataccaaagaactagagcacataatcgaggtgggtttccaattcgagtcgatcgtatctgacatttgcaatcggttcgtggcatgatgtgccaaaaaccaggcacccaaaccaaatcgaaccaatgcaaattcgaactccgatccaagggtgagtcagactagtttggaggtgcgccaatgtctgaccttttgaccaggcgctcagtcgctctatttgccagctcttttaacatattgtgaataaatctatatggagccaatgcatcgatattcttcggtgggaaaacttgtttggctcactttacagttaaccaaagcacagaaagaaatgtacaatcaaatctcgggaaattagtgtgccaagtctagaaaataataaaataaaaatattattaattagggttcctggttcaaatgctaattacctcagactgtattccattttcaatagttaaacgtaagatcaaggtctccaattctcaatgtctatgcgaacatttttctttctgtgcagaaatcaaagtatctggcggatacttgttgtgcgcgtatctgtatcgcggctaaccgcaaacaagccgatttagtccgggttctagtcagatacctagcttatgatgcccggtggagcgaccgactggatttcaacaatttcaattgcggctcgattgcatcgatattaaataaccgaaataaccataaaaccaaacgctttcgtaatcgtaggaaatcagccgcagatctgtaaatcagaaatctaaatctgaatttgaattcgaaaccgcctacctgccgcagttgattgcgcttggggaatgcttccgcgttctccggcagccagcgaatcatctgccgcgccattcgctccaccgcagatccattggaggcccacacgaggatccccgatttggggcgagtggggcgtgtgatgaacctcacaccgttgctgattgagccggtgtcttcggttcctcggttctgtttgagtgctccgagcggggcgggcggggctgggtggttcttgtctaatgagctttatggaattgacacattgctgtcaggcaacactgagcagtgagtggatccctgatctttttccacctgcctgacttttctagcacaccatcgtaaagtggaaaagtatccgcgactgatacagatagatttgcatttctacagtgtctgtgcttctcgggttagataagatttgtttgggggaataaattgagttggtctatatgcgcgatatgattatcgtaataagtgaaaggaaattgccgaaggcgtgaaacgtaattagcttttggtacgcagaacttatgtatgggttttgggttattcccagaatttgttatgaataaatgtaggtgagatggaaccgcagaaaataaattaaaaccaatatagtgcggtttaggtgtgatataaaatatataggctacgagtatgtggcacacggataagtttgaatgtctgattagcatcgaatgtacggttcttgcattggtttgttattccgccgctcattttatgtagttattagtgattttaatgaattgcattttttaattcactccccaatagacctgcagaaatcacataaaaaccaccctgcctgagaaccactatagagctgtctgcagagccctcgtgacggagaccatagagctccgagtatttctgcagcaggtcctgaacaatggtaagtgatcctactgttagactgagaacgcagcttgttaactaattaattatcttaagaagcaggtgccgagaaactgatcaaggcgtcggaatcatcggccaccacgcaacaagaactggcgaagctgggcttcaacgactgggtaagattcttaaagagtgctgtccccttaaaacacacagatactacaacaccatagcgtaccataccatagttatgtaatggtgctccactaatggcccacagtggcgatagcgtctcacgatttgtttggcgcacctcttcgaacgtaaacatacatatgccatgagccatcatcatcataatcattatcgcaaagatcacgagcatttgtggcggggttttccgctctgggctggaataaaaagtgaactatttcatgcattgccaaatgaaactcacttttaatttcaataattggcccgcggtggtcgcctccattttggccatcatcctaatgagttcaacggcgcaccattcgtatacactcgtatgtactatgtgatttcgtgaactattttaatggacgcatatatcatctatatattttggcgttcgctgtgacctttgccgaatatgtcgaggccgccacaggagtttgccatcatcaccacatcggcccgccatagccgtcattcaacctccgaaactcattgagacacacacgcaaattggccaggcacgcaagccaaaattcgctcttgtttttgcttcagcttcttgttgactttttgtggcgtgaaaagttatactatagtagtcggctttaccgttcgaggtgtgtttgattttttttaatcagatggaaacccaagcctgtcaaagaacagttggcaaagtttgtcctcaaaagttgataaggctgaaaaagtattaaatattgagttctttaagcttcaatgtctttagacttatttgcatacttcgggaaattctacagctggtaaactatcgatgttccagccacgataataacccagattgagtatgaatgtaaatcaaatgacttattatttcagttgctaatttgtttgttcaaattattgccaccaacaaattctgaaatgactttatttatatgaactgctaattgcttaaatttaataatgccgcttctttgttttgaggagtcaagagagcccaataaaagacaaattatctgtagtttagtgcagtaataggttttattgtatccaaaaacgaccaagaaagttcaatttcaaaagagtttaggctcgtcttttcctcgcatgtccgatgattacaaatcgcaaaaaaataaagaaacctttgcgtgtgaaatagacgacacatcattatttgcctatactctggagtacaaaagaaacacaaccagatagcgaaatagaccataaatatttgcactccatgaatttgcatgtgccgataggcggggattaaaaaagagggtgcagccgtggaattggccaattaattggccagacatacaccatatatcatatgcgcaatgaagacctggcaacgaatccagtcaagtgtgtttattttgtgtcttcttggttttgttggtattgcgaaacgagcgttgattaaacgccatcttatctatttctacttctccgataagagttctctacctttgtttggtctattgtttatagggagtgtttttcttttatttgcactcgttctttagctactgccaaacgaagttcaagaagtgtgtctttagtcagcgttttatcgtgttttctgggaagacaacagccttcagaatgtcacacagccaactgattgttaaaacactttttgactgaatttacattgtttttgtttgggcattataatgctggaattgcggaaatatagctggttctgttttattactattttttctctttggctttgaacgtgtttcgctggcaggggaaaaaaggttttccgaggaaatctctcttttcggcagacatcgtgtctgtgtctcgcctagctgccttcgatgatgatgatgatttggtatgctaattttcgatccagacgttaccaatcttgtacgcacatggtccaaaagtatttcacaagcaacagcagatacatcccaacttttgcggaagctgctgccactcaaagctggcctgatgttgctgctgcaagttgatgttgcagctgctgcgtctaatgctgctgcggtgagcgtagttgaagcgtggcgcggcatcttaatcgtcggtacatttatgtatgtgcaacatggtgtcaaaacatgtgctgccattgatgccctcagctgaaatcggaccctagatacgctccaccctcctcgcctcgttttgcatgtttaatgaggtgtctcaagatgcatggccaccaattggcggcgaacgaacaggaaggcgatggcgaatggaaagtgaaattgcggatcactgttacatatcaggccccattgtgtgctaaacagtcttcctgccatcgcgcagcgttcaacactcattactcatacgcacagttaacttgtcaggccgatggatcggatcggtccccctcgcagcgggagtctaaactattggctaattaaatgaaaataattgcaaaagtgaaatgcacctctcaccactctgtctgcttgtttttcttcctgtctcaagcacgaactgcagctgtggagggcactgcaagtaggtccctggttccattgcatgttctccattttgtttgttcgttgtttgtttgtttgcctgcttgcgtttgccgtgtcccacatcgccagcgatccgtcgcagctatctagtatcgaatctctattgattaaccacaccttcccgaatccataggcacgcttctgggtgcaggtgatcgacgaactgcgacggggagtgcggctgaagaagagcaaccacgagcgcactcccatcgaatatgagctgacaccctacgaaatactcatgggcgacatccgagccaagtgagtacaaactaaactagtcgataatcgccaagaaagcttacacagttgagatacttcttcattaaattacaatgattgtagatgatttgattttcagaccttacatagataacataattagcaccgcttatttgtagccaacaaaagaatgaaagcaataccccatttagaaaacgcatctaagcccgaatttctcttcacagaaagtatcagttgcgcaaggtgatggtcaacggagatattccgccgcgcgtcaagaaagatgcccacgccatgatcttggagttcatcaggtcacggccgccgctgaagaaggtgtgtaaagcccccaatgcaagttccccaacgaattcccaatccactcgcatggccagtacccaaatcaaccgcaatcccaactgcaatccctcctcatcaaaatccccatttcactttggcaaagtgtgaaatattaaactacaggttttccctttttccgacttcatttcattcgccgtgattcctaatttttttgtaccaaattgttgtttttcttcgaaataaaaattattagtttactgtacgttcttgtttctgtttctgtactttccggacccatcaggccagcgatcgccaattgggcccgccgcgcatgtgcgagccttctccgcgggagcagctcatggagtccatacggaaggggaaggagctcaagcagatcaccccgccagaagcaccgaccctcagggaaaggggtgagtaatcaatgttcaacatacctgatgatattagaattcccatttaaaatatccatttcttgttaaatctacatatgagcacttgcaattgcttaaatattgaagtacagtggtgggtttttggaaatccgtagggtaactctatacatgaccaactaataggttccactctcactgacctatccttcaaaaggccaagcccattgtcaaggggaaacctgtaaattttgcacagtgcctgccaaaaatagatgccgcctctaatcttctgcgggcgtccatcgcttggatcctggtctcaagtcgttgtgtgctggtgactccaaattttaccgccaacggcccataaattgttgtcgcctatatagacaaccgatgtctcctgccgccgagaaatatagaagaggagtgctgagggatggagaaaggggcgctggtggaaaactagttactggcaagactttttcactgcacttgttgctgggggagccccattgtccgtccgtcctcctatttttctgccatgtttgtttgtttgccgtttgcagttcgcctgtttgtgtgtgtttgccggccaaagagcgcatgccaacatagatcaaaaatagcaagattttccaatcacaacactgaaaggaatattatgtgcacagtaatcaaacgaatgtattcaatatcgagatcttataaacctgacgaaagaaggtggctctttttaggagcacttagaagtgttaccatttcttagttttttaaaacattacaaactatttattatctacaaagtgcaggagcgcctttcaatttttttttcctgtgcaatccccaccccgaatccaaaattgaaatccccaatggaggaagcgtgcaaaattgtgacacacaaagatagcgacaacgcgacgacgacaacggcaactgcaacattaaagccaagaaaatcgaagaaaaccaagcacgacaacctcacctccgtcgaagttggctattgttgcctgtttgggttttcttttcggctgggaatctcgtatttcttctccgactttgaagattatttaaatattgcagcaactggccgaatataatttgtatgactatataaaatcgcatcgagttactaatttctacggcaagttaaatacaagtcagtcaagtggtatatatttaaagccttaaaaatatttaaacaatctttttgtttaatctgatgatgattaattaactcaaatacattttttacatttaccttacatggttcaaattgtgtagcctaatcttaaggtgaaatctaaaacttgcttaatatttcaaagcatacttatgggtgcttggaaaaaaattgttttggttttacagaaactgagaaatagcaaatttaatgtaagttctttgaagaatagtcagtagttaaattgaaaaggaaaaatagttaaaacccaaaccgacctcgtctcccattatccttcccttgaaacttcttgtgccttgattgccatatcctcgcgggacattacgcgcttactcatcatatggtggtgagtccttgttgccgcttgacgacgtcatcacctcaacggtgacgtataaatcacccacgcaacaacaacagcgacgacggccaaacaacttttaggccgttaaatgtcaaaacaaaacattggcgctctctgcgagcgacgcatgcgcaaacggagccgaaaagtggggaaactcgagttgacagctgccacatttctcagttccgtgttgagcttcgctggagacgcctcgtcgttgtccgctctgcagctaacaattattctgtgggctaagtgaaaatgaaatcgaaagcggtggctatctagtaaaataagcaaagtacaacaaagtgacgtgtggatattgcgaaaccctcaaccatatttaatggagctgctgggcaaacccgactgattcccatcaaccctccctgaaaagagagaacagtgcggcccagagggtggcttccctttttcggactcggatcgatagcctccatgcaaccgtgtgagaaaaccgaaaagtgaaaagccaaacggaaatgtgccaggcttaacccatggaagcccggccagcgaaacgctccacagcggcctccgtcttccggtcgcatcacatgccgcgggagtcggatctggtggacatcggcagcgatgcctcgctgtactgcggctccgacggggagtccagtcaggcccagtccacatccacatccactccgaacccgcaaacgagttccgaccaggatctggaccagcctcagccaacacctcgcgcggcaccgagagcatcggcctccaataatccgccaacacccaagccacgacaggctatcaggtcatcaaaaggtagacatcagcatctccagaccctcgcaaaacacacacaatagcgtcttcccattgttgaatgtgctccgctttgacctggtttcgatttcaggcccgccccaaagtgcaagtgggtgggctgggggttgggtagggttccgtactctcccctcgtactcttccccgaggaagtgtttcttgcttttgtcctcgagaagctactccaaggcaactgcagtgctccggtaattgccgtcgtattatgacttcgattttaagctccagtcattagaggcatgaagaaatagggtccaaagcagatctagacatacgccgaaggctaaataccctttgttgtcaagtagcattgaaaaatagtttgttttatttgttcactgcgtttggtcattagcgacatggagaaataacacccaagataaatagactttgagtcgtttgaactagccaacatatggaaaaatccgaagccatagcttccattgcttgcttctatgcagttgtatgaatatttgactatgatttattttgagttttcaaatggttatctttttatctagttcatagttttcataatccaccatccagtaaagcagatcgatgaaaacgctcgtgtttgccccccgccgaaaggttaaagccagtggatataatgcctagcccccggtggtccgtggtcaatggtcagtagcgagccggatcacgtagcagttattacagagccgtggacccataaagtatatttgaaaaggcgaagcgaactcttccgctgcagatacgagttcccaggcgttgcacaagcggagtgggtttcacaagtagaaccattaagtgcgatgggcttaacggcttttatggtgtggctaagtaaaaatataaaaaaaaactatgactacctttgatgtcggtgaagtgagaacctagacatgtcacctctaattgcgcaatgagcgggcaaaaagggctggaaaatccagttttattgcgagttattcagagatgcctgctccattgcccaacgatatttattagataatccatttgagcctacaactttcccaccactttcgcctgagaaacgaggacttattgttactccgatctgtttttcttacagtgcttccaagtgcaaactccacgctgtcacgatccagacagcggctcatcaaagtggacttctccaagtttcaggtgggtttcgcggaatccaaaaaacctacaaggggatctgaccttttttcctgattttcttattttccaggacgacgatctcttctacgatgagaacagcatcagcagctcccactccacagcggccacccaccagcatcatccacatttcgccgagatgcaccgctgctcgcagcccaagatgccgccgtatccattcggtggctacatggtgcccagtcaggcacgacaagattgccgggagacggcgtcgctgatgcggccccgacgcacaagtgagtatccgattctagcacggattatgcaacatatgtccgtatatttataatccacttgggatctttgggagcacacgccactagagcacaaagtacaggggcggtgtggatttgattgaaattcgagaaaaatcggtccgacaaactaacatttgatggtttttaatttaagtttacgggttaggttaagtatttaagctgaaaaagtatttccacagcaatgtatacttatttcgaaatatttatggaaagaaagaacttcctgatcctcgaaatctttaatgaagtctgtcgctacaactcaacaatattttatgaagctttctcccaattatgaactaagaaactcttgcgctaattaaataggcacttgccacaactaacttcctttgtataaaataaataattttccatttaaaaccggtttactttatgctctagctttaaatgccatggccaagccatcgccttacgtctttcactacgtattttggtttacaattgcagacagaaagttactaaaccgcaagacatatagaataaaattgcttttaattttttttttttgtggtgaagcaactgactgtctgtgatgtggtttaagtttttataattttaatttaaactatttttatttcttacttttttcctttccttacaaaacaaacaaacaaaaaacacacacacaaacttattttgccaaggtatttgatcgtttttctgtgagcacactgctaacctagatcgattaattaatttttatgattttgtatgacgcaagcaaagccctagaaaaatcgagtgaacgaaaagttaccaattatcgcactaagatcaaaaaaatcaaatagaaattttggtgtggtgtgggccgaagtagcaaataacaattcaaaattgacgatcggttgaggaggcactcaagcacacacaatgaaccacacaaatatacaacaaaaaaatctcgaaatattttgtaaaaacaaatgtgaatgtagaaataaaagaaagtctactgcaattcgcccctagtattatttattattatggcaccccgtagcggcttttaattttggtactaacttaattttctcggctgccaataatcgtataaaaataatgtatttttaacttgacaaaaaattacgcttacaaacaaaataaatatgtgaaaaacgaacaaaattaactgctgcccaatacgaaaatgaaacccgatcagtggagccagcaaagcaggtgccgcctccagaagagccatccttcacgaaggacgagtaccacaagttctacgacacggccctggaatgtaaatatttgctaagaaacagcacgtaaaaccgtaatgcattgccatcttgcatgattgtcccccctatcggatatcgaaattgcatttagacgctacactagtatatatcacgctactaaacagacagcttgcttttgaaatacacatctgacatttaacatttgccgcttttccctgcgccttcactgtccttcatgtatgaaaataactcatccgccccgttgaccctgactgaatgcgttctcctctctttaattgacagcctacgacctggccactcagtgcgagtcgaggagggcttccttgcgccgccacaccatcgttggatgccagagcaacctggacgagacgcactcaatgccgcccacgcggcccgagtcgcgtcaatcggacgacgtcagcaaggaggtgagtccgccagcataatggtaatgatgatatcgaggaaagagtgtgccctctacttttgtattattgattcgagaataatacatctgtggtgggacttccatactttacaatatgctggactctttcattgtagaccatttctccattcaagcaaacgttttattagcaaatgagaacagtaaagcttaaaccctattcaaactttatttctatatctaccaatccgttgcagacgcctaagagaagtcctgcggagcagacccatccctcagacgagggcagttcaacatcctcgcttgggccatggaacaagtccttcatggacaaacagacgtggatggaacggggtgacgatcggctgtccgtaacgctggcggagatcgttcacatccgttccgtcatgaccaaggcggagctggagggcctgccgatggacgtgcgcgtcaaggaggatgttgaaaagcgtcgcgtctgcttcctgtgcctgcgcactcggttctcgttcttcggtccctggggcattcagtgcaagttgtgccagcgcacggtctgcgccaagtgctataccaaggtaggtaccgggttaatggttaaccatagggctgcatatttactattttcgatttcttcccagatgcgaattccctcggagcacttccgaaacgtgcccctcgtgctgatctcgccatcgctgctgtccagtccggccagctcgagcaccccatcaccctcccatcatgcccagcaggcgcactcatcctcgacggggaacatcatggacgaccagttccccaagtcgttgatagagcgtcttttgcgctccgagtcagatcgaaaggtaggcctcctaacagcagtccgaccagtaaacatggaactaatgaaattgatacctttattccagactcgcagcactgtgggcagtgccccatcctcacccaagcaccaaagatcaaacatgagcacgcccggcattagcgtgggacccggagcatcctcctcctcagcggccgccactggacaggccgtggaggcactgcacgaccaggcgaccatgtcgtcctcgtattccgcggccatgcgaccctctggcgtccaccagcagcagaagcagcactacaacaacgccatgtcgaggagcatggagggaccccgaagtctgcccgtgcacagtccagcatatcgaccgctctccaataacagcaccttggagaggaagtgagttttttgtctgggttgtggtgcaccacatttattaaccgtaatttattctcagatcccgcttttcgaggggattcaacctgttctcctcgggcagccatcttgcccagacgcaggagcaaaaggagaacctgcgcggcgagcaggtgaccgtgtgcaacgactgccagggactggtcaacgagatcacgagctccgtgaagcagaagcgcagctccgcacggaaccgcaccattcagaatctcaccctggatctgacgcccgtctggaagtaggcgggaatcagatcagagataggataactccgcagtgcgtttgaagaccgtaggatggttgcaatggagttctaacgactgacttggctctacatcgctatacatactaccattgactacatgacactgatgatgactcattgacagacaacagacgctatttgattactgaccacattccttacctgtgagaattttcagtttcagcgcggctgttttagggccttcagaacgcacttgcacatttagctattacatacatgcatagatatggattagatcgactgttgtacacttaaaaggatagagcctcgaggagcctcgtttgtaaatcgtgttagtctagtgaataagcagaggagaataccgagaattcctggctgaagctttgtacattttctgccggctacagagagatccgcttgagcgcaccccaccactttctatttataaaggagctaacttacacgtcgctacacattatattatcgcagatcgcaacgcgatgccgttgtttataactgttcaaagtatgcgtaaaagttgattaagtacatgtaatcataactcttgtatccgcatatatcaaatgcacatatattcgaccttacttgtaccctgctcctgcattcgtttcagcacgagcgacgtattgatcatacagaatacatcgatattcgcaatacgattcccagttcagaaaaaaaaaatttcgattgttgaaatagttatccgaaaatgttgtgaaacttttgtgcttgcgcagatctttgtttacgttgtgaagttttcgttttgttcccctattaactacaatgtcaatgtataacgcaagaactacttgatagcctaatttaattttagtcggcgttgctatgcagcccaaactatttagttaattcgcttagttttaattctccctaagtgcgtctaagttgtaagcgacgtctatataattgtacaagctgatgatgcaaagcaaacccctaacgaacattatattacctaattgtagctgctattatagtttttctaaccgtttttgaacaattttgtttgatttatctgtaattgtaaatgcatttaagtacttgtaatattaaattttatgcttttaagttaaattcatttacaataatttaatacacacacgaacacacaaagagatcgaaaatacacaaaacagcaataataaatgaaaatacaaactaaagaacaagattcaggttttacacactggtctttatttgtagctttctgctgagggaaacaattggattcatagtcttctatgtaaaataaattagagcccacctcgttatttaggtaacagactatacatgcatatttgaagaatattctgtacctgcaacgattattttgaaaactaagagaaagcaagtattatatatgtaaggccttaaagctaggtcaactagatctaccgagtaacaattaagcttggtctactgcgatcaaaagactcgggtggcggaatataggtggatgagttaatccccacgcgccttcttaccaccgccatgtttgtggtcgtttccgccgtggcgcttgcgattgaagcgcttgcccttgttcctggtgaaatcgcgtcgcttcttcatgaattctatggccttgtcgatgaactccttctcctcctcctcggtggcctttcgcagcgacagagagacctcatctttgaacttgagctgtggataggcaagtacaattacggattagctgataagggaaaagttataatcccaattctgattcttaccttgccttcctccaccttggcaatgtacttttcggccgcatcggcctccgtcagccgcacagagcccttggtttcgcccttggcgaactcaatgtaggccacctcgaagtccttgatcttctcgaaggcttcgcgaatttcctcgcggctagatgtctccggagcgccctcgaagacaacaatggcgttcttgggcagctcgaaggcaggctcaggcttggcctcctttttgtttttgcgcttctcgttcttctgggcgtattcctcctgcttctccttaaggtagtccacctgccatttacgcagcagctcgcgctccttataaacgatcttctcctgttcgaggaaggcctttgcctggtccttggtctcgaaagtaaggaagatgctgcccttgaacttgtacgacttggtgggcttgtcatagtgcttgcgcatggt

SEQ ID NO: 42278 - DNA, 4872 bp, DROSOPHILA
caactcgcggcgaacggacgtgtgtaaaaaatagccggtgagaaaaaacgaagtgcgattgccgaagaaaaacagagagatttcaaataataaagaaatgcaaatgaaacagaagaaaataaaaataaagcaaagtgcgtgatttccatctcctcagtgttgtgaaatttctagcagagtctaacggcgatttgcgaatgccgacttaagaagtgcgaaaacaaaaacgtgacgccagtttaaaatattctcaagcgaaaatcatgtgttttttgttataccctgtgctttgtgtttaatgtagctgacgacaaacaaaatattagaatcgtgtacgtcgggaatccgaattccatcccctcgtgttgtgttattattgtattaaagtttcctttgccatttaccacacacaacacagaaaaacaacaacaacaaaactaaaccaaaatcgaaccaaaaacaaaccgcgaattttgcaggttagcccacccgaaagaggcaaaaaaatcaattatatgttggccagtgccgggtttgcagtggaatcgggttgaaagccatcgatagccacacacgcccacacacataatgacggagcaccaggccgaggagcaggcggacacgccgcccaccaaggtcaaggccacgcccacacccaccccgagtggaaagttcaaggacgcgaaggaagacgccttcctgtccacatcgccggacagcgccaacggcgatgcccaacacaagctgccagcggaccagctggccatgtcctccagtgcgcatccccagcaggcgggccaagcccgcccgctcatcctgcaagccttccaccgctgctcctcgccagaacagtgcgtcacgctgcacgacatcctggactcctttaaggcgccgctctccgaggaccaggcctgggccctgatccaccagttcgccgggctctaccaccaggtggccgtacaagcgcacacctgtgccgcggactacgaggccgccctgcccaccggattcgagctgcacttccatcgcgacggcagcgtccacttctccggcccggatcagctgacgcctaaggagcaactgcagcaggagcagatccccctccccccgcagcacgacgtgattgtggatcagccggaccacagcgccagcagcagcggcgacagcagcgtcatcaacagagcgttcgacaacagcaatcaccaccaccaccatcaacatcatcacccgccgctcgtcgtctcgcatagaaagattatcagcgaactggcggaaatcgtctacaccgccttggattacaatctgccggaggacgaggagtgccaagtgtcacaggagctggagaatctgttcaactttatgacggcagatgagacagacgacgattgcattgacgagggcatcgacgagggcgacaagcgctgggacgacgaatccgaggaggagcgcaacgataccaaagaactagagcacataatcgagacctgcagaaatcacataaaaaccaccctgcctgagaaccactatagagctgtctgcagagccctcgtgacggagaccatagagctccgagtatttctgcagcaggtcctgaacaatgaagcaggtgccgagaaactgatcaaggcgtcggaatcatcggccaccacgcaacaagaactggcgaagctgggcttcaacgactgggcacgcttctgggtgcaggtgatcgacgaactgcgacggggagtgcggctgaagaagagcaaccacgagcgcactcccatcgaatatgagctgacaccctacgaaatactcatgggcgacatccgagccaaaaagtatcagttgcgcaaggtgatggtcaacggagatattccgccgcgcgtcaagaaagatgcccacgccatgatcttggagttcatcaggtcacggccgccgctgaagaaggccagcgatcgccaattgggcccgccgcgcatgtgcgagccttctccgcgggagcagctcatggagtccatacggaaggggaaggagctcaagcagatcaccccgccagaagcaccgaccctcagggaaagggtgcttccaagtgcaaactccacgctgtcacgatccagacagcggctcatcaaagtggacttctccaagtttcaggacgacgatctcttctacgatgagaacagcatcagcagctcccactccacagcggccacccaccagcatcatccacatttcgccgagatgcaccgctgctcgcagcccaagatgccgccgtatccattcggtggctacatggtgcccagtcaggcacgacaagattgccgggagacggcgtcgctgatgcggccccgacgcacaatggagccagcaaagcaggtgccgcctccagaagagccatccttcacgaaggacgagtaccacaagttctacgacacggccctggaatcctacgacctggccactcagtgcgagtcgaggagggcttccttgcgccgccacaccatcgttggatgccagagcaacctggacgagacgcactcaatgccgcccacgcggcccgagtcgcgtcaatcggacgacgtcagcaaggagacgcctaagagaagtcctgcggagcagacccatccctcagacgagggcagttcaacatcctcgcttgggccatggaacaagtccttcatggacaaacagacgtggatggaacggggtgacgatcggctgtccgtaacgctggcggagatcgttcacatccgttccgtcatgaccaaggcggagctggagggcctgccgatggacgtgcgcgtcaaggaggatgttgaaaagcgtcgcgtctgcttcctgtgcctgcgcactcggttctcgttcttcggtccctggggcattcagtgcaagttgtgccagcgcacggtctgcgccaagtgctataccaagatgcgaattccctcggagcacttccgaaacgtgcccctcgtgctgatctcgccatcgctgctgtccagtccggccagctcgagcaccccatcaccctcccatcatgcccagcaggcgcactcatcctcgacggggaacatcatggacgaccagttccccaagtcgttgatagagcgtcttttgcgctccgagtcagatcgaaagactcgcagcactgtgggcagtgccccatcctcacccaagcaccaaagatcaaacatgagcacgcccggcattagcgtgggacccggagcatcctcctcctcagcggccgccactggacaggccgtggaggcactgcacgaccaggcgaccatgtcgtcctcgtattccgcggccatgcgaccctctggcgtccaccagcagcagaagcagcactacaacaacgccatgtcgaggagcatggagggaccccgaagtctgcccgtgcacagtccagcatatcgaccgctctccaataacagcaccttggagaggaaatcccgcttttcgaggggattcaacctgttctcctcgggcagccatcttgcccagacgcaggagcaaaaggagaacctgcgcggcgagcaggtgaccgtgtgcaacgactgccagggactggtcaacgagatcacgagctccgtgaagcagaagcgcagctccgcacggaaccgcaccattcagaatctcaccctggatctgacgcccgtctggaagtaggcgggaatcagatcagagataggataactccgcagtgcgtttgaagaccgtaggatggttgcaatggagttctaacgactgacttggctctacatcgctatacatactaccattgactacatgacactgatgatgactcattgacagacaacagacgctatttgattactgaccacattccttacctgtgagaattttcagtttcagcgcggctgttttagggccttcagaacgcacttgcacatttagctattacatacatgcatagatatggattagatcgactgttgtacacttaaaaggatagagcctcgaggagcctcgtttgtaaatcgtgttagtctagtgaataagcagaggagaataccgagaattcctggctgaagctttgtacattttctgccggctacagagagatccgcttgagcgcaccccaccactttctatttataaaggagctaacttacacgtcgctacacattatattatcgcagatcgcaacgcgatgccgttgtttataactgttcaaagtatgcgtaaaagttgattaagtacatgtaatcataactcttgtatccgcatatatcaaatgcacatatattcgaccttacttgtaccctgctcctgcattcgtttcagcacgagcgacgtattgatcatacagaatacatcgatattcgcaatacgattcccagttcagaaaaaaaaaatttcgattgttgaaatagttatccgaaaatgttgtgaaacttttgtgcttgcgcagatctttgtttacgttgtgaagttttcgttttgttcccctattaactacaatgtcaatgtataacgcaagaactacttgatagcctaatttaattttagtcggcgttgctatgcagcccaaactatttagttaattcgcttagttttaattctccctaagtgcgtctaagttgtaagcgacgtctatataattgtacaagctgatgatgcaaagcaaacccctaacgaacattatattacctaattgtagctgctattatagtttttctaaccgtttttgaacaattttgtttgatttatctgtaattgtaaatgcatttaagtacttgtaatattaaattttatgcttttaagttaaattcatttacaataatttaatacacacacgaacacacaaagagatcgaaaatacacaaaacagcaataataaatgaaaatacaaactaaagaacaaga

SEQ ID NO: 42279 - protein, 1020 aa, DROSOPHILA
MTEHQAEEQADTPPTKVKATPTPTPSGKFKDAKEDAFLSTSPDSANGDAQHKLPADQLAMSSSAHPQQAGQARPLILQAFHRCSSPEQCVTLHDILDSFKAPLSEDQAWALIHQFAGLYHQVAVQAHTCAADYEAALPTGFELHFHRDGSVHFSGPDQLTPKEQLQQEQIPLPPQHDVIVDQPDHSASSSGDSSVINRAFDNSNHHHHHQHHHPPLVVSHRKIISELAEIVYTALDYNLPEDEECQVSQELENLFNFMTADETDDDCIDEGIDEGDKRWDDESEEERNDTKELEHIIETCRNHIKTTLPENHYRAVCRALVTETIELRVFLQQVLNNEAGAEKLIKASESSATTQQELAKLGFNDWARFWVQVIDELRRGVRLKKSNHERTPIEYELTPYEILMGDIRAKKYQLRKVMVNGDIPPRVKKDAHAMILEFIRSRPPLKKASDRQLGPPRMCEPSPREQLMESIRKGKELKQITPPEAPTLRERVLPSANSTLSRSRQRLIKVDFSKFQDDDLFYDENSISSSHSTAATHQHHPHFAEMHRCSQPKMPPYPFGGYMVPSQARQDCRETASLMRPRRTMEPAKQVPPPEEPSFTKDEYHKFYDTALESYDLATQCESRRASLRRHTIVGCQSNLDETHSMPPTRPESRQSDDVSKETPKRSPAEQTHPSDEGSSTSSLGPWNKSFMDKQTWMERGDDRLSVTLAEIVHIRSVMTKAELEGLPMDVRVKEDVEKRRVCFLCLRTRFSFFGPWGIQCKLCQRTVCAKCYTKMRIPSEHFRNVPLVLISPSLLSSPASSSTPSPSHHAQQAHSSSTGNIMDDQFPKSLIERLLRSESDRKTRSTVGSAPSSPKHQRSNMSTPGISVGPGASSSSAAATGQAVEALHDQATMSSSYSAAMRPSGVHQQQKQHYNNAMSRSMEGPRSLPVHSPAYRPLSNNSTLERKSRFSRGFNLFSSGSHLAQTQEQKENLRGEQVTVCNDCQGLVNEITSSVKQKRSSARNRTIQNLTLDLTPVWK

SEQ ID NO: 42280 - DNA, 6572 bp, DROSOPHILA
acattgcagacactgagccacggagcagatgaggttcttgcgctgttgctggaggtaatcctggcgagctgtcagacttcgcagtttttgaagcttgtggataagctcattgtttgcgttgaggaaaggactataatccttgatccgctgcaaggagctgggcaaggcgcccagttcaatcacatagaaatcgaagggtgcgtattgtgttgataatctctgcagagcttccaagtccacaggatcgcgaccttgcacttgctgctcctccacgtagaccacacgtgcgttgcaatggagtcttttaaacgtgttctgtgtttgcgcgaagtgcaacatgtcgagcagaacgagcgactctgcggacccgtccaggacaagaagcacctcggcgtttctgggcagaatcttggcggctcccagagctgcccgaaacttgtgcctcgcatacgctagaaagcattcccggcactccgcagttcggaagttgagtttgtagagctcgccggagtttacatcgcatttgctgcaattccctggactgaggacgattcctaatggtagggattccactaccatggcgtgggcggcaccctcgtctccaaaatcatcttcaccaatgctgcacatggcaataatttacgtctaatccacaacaaaaagaatttcgcagataaacgaaatgaccagggatgaatacgttgtgaaatgaatggatacaaaatagcggaattctagacaaatgtcttctatctataatctatctatatagattatctatatttagtgtcaaaattagacggcaagctagcgctttcttataatataatatcgaatataatatatccaatataatttaaaaaagcgtaaacctttaacttatattttaaactcatatattacctttagctacggtatagtctatagctgtcaacactgtttcgagggcattccgttatcgaaggctatcgatatacctggcaatatatcgactacgcagcctagactcgtcaaaagcaaccttgcaacaggaaaagtgcagtgaaaaatataaaaatagctgttcaaaccacaatttgttgtacaaatcttaataataagttaaatttaagcattgaggtatgtgtctttggagtttgtgttgaaaaatgggctcgaaaaacccaagaaatttgggcgcaaaaaactgggtgctgctaatacgtatgtatgtgagttctgcgtgcctgtgtgtttgtgcgcgctgtgtgtgtgcgtcgtgcttgtacgcaagcaaaaagtatcgggtagcaaaatcgagaaactttcttattgacgatagcagatgggaagaagaagcaattaaaagaaggaaggaaaaagtacgacaaaaagtaaaataaacgccgaaatccaatttcagagattaaaagcagaagcaacggcggtaacaggaagtaagaagttcacccaaatcgcaggagcacagtcgccagagcgacagaggtcatcttaaaaataatttttcgggcgtgtttgccccccgagcacgattaaccccccacccagattagcgcagaccaacgcaagaagcccccaaccaaaaaacaaaaacaacagcagcagcagcaagcagtagaaacaacccgccttagcatgattctggagaattcggacaagctcaaggattggctgagcgtggtcctggagccactgtaagttcttgaaagccgctatttcatcgctatccctggaactaaccccgtcacataccaccctcccacttacagctgcgatgcggactcctcggccttggcgcgatatgtcatcgcgctgctcaagaaggacaaatcggataaagaccttaagcggatcatgatcgaacagctcgatgttttcctgtccgaggagacgacacgtttcgttgaacgcctcttcgatgccattgccagcgaggaatacctgacggtccctgctgcccctctaataacagcctctagtgcatccaccgctgagctaacagtcgaccaggaactggccctggtcattgatgggccccaggacgacatcgaagcggttttggttgccgattcccctccaccgcctcctaaagataatgtgataaaacccgatagcaatcaggtcaagttagagcaggccagtcaagatgccagggaagctgaggccctagcttttatcagccaggaagccggcattgccatgcacgtccctacagatgccaagccagcctttgatgtgagttttagtggtagcttcgccttagctgttttgtttatatttctaatttatccagcagcataaaaccaaagactcccacaatcaacagtcagcctccaactaccaacaccatcatgtgcgcagtgccagcccaccgggcagaagcagcggcgtcagcggaagtggaggaggtggtcccggcggagcaggtcttgcggcgggttatgctgacaaggaaaaccagccgcgcgacagtcgacgacgacgtgcttccctgcgatcccgttcccgctctcgatcgcgttctaacgagcgcgcttttcggcggtccaggtcacgcgaccgacgggtgaacgaacgcgagaaaactcaacgacaattccgtaacaaatctccaccaggctcgcagaccgacaatcgccatcatggtcggcgcaactttgatcgccggcgcatcggtggcaacgcagatgatcgtcctcgatttggcaacaataagagccggcgctctcacagtcggtcaatgtcaccggaacgaaacgcgcggcgcaaccagaactccccggaccgagtacaaacagcccaagctaacctaattcccgctccagtggcgccgccagcacccgttgagcatccggcttcccatcctcgtcagcgctgccgggactttgacgagaagggctattgtgtcaggggtgaaacatgtccctgggaccatggcgtcaatccggtagtgttcgagggcatcaacaacacgtccctcatgatgtcaatgcgcgagtacaatccggatgcgcccgaaatatgggctaggagcggaggtccgccaccaggagctggtcagggaccagtgcctccaccaacgcaaccaggacagaccaccattaaccccttcagcggtaatgtgcgaccaaccacgctaatgagcggctctgggcccagtccgatgggcgttccgaatcccgctgactacgcgcgcaatccaggcgctccgccgcaggcggccatgatgccattccctttcaatcccactgcggttaccactcccttgcagcggcagctgatacctattcccgtggttgatggcgctcccacgggaggcgttgctgaggttggtaagcgacgtttcgaactggaggatacagtggccattgccgatgtgccaacgaaacgaaaggtgccgatcaacagtcgtcttggcccgcgtgtcaatcccaacatgcagcagcataacagttcgctggagctgaggaaggtaccgcgcggacttaacaccatcgctcatttgaacaaccactttgctaagttcggaaagatcgttaacattcaggtttcgtacgaaggcgatccagaggcagctatcgtgactttttccactcatgctgaagctaatgtggcctacaggagcacggaggcggtgctaaacaaccgatttattaaggtcttctggcataacgacagcagcggagcggatgtgggacagatgaaccagatgggcggcggtggaggaggcggtggacggaagaacgccagccagtaccatctgcataacgttccggcagtgccaacacccaatgcggatggtgcgaagatcagcaatgccaatcctctgactgaggcgggagctggtaacattggcacccctgccacggaacaggccaacacagcggctccggcatcaatgcgtctcaagctaaatacaacgacagctggcggctcagctggaggagcagctggtgcgggagcaccgggatcaggtcgtcctttgaaccctgccgccaatgccgctagcatacgcaagaagcaggaggagcagcagaaagcagttcaccaactggctaacgggttgcgcaaacgcaaacaagaattgctccagagctatatgaagcagatgaagactgctctggaactggtggagcgaatggaccagcaggatcctcagagggcccctactctgcagacaataaaggtgctgcagatgacaatcgacaaactacgaaaggaaatcaaggccgaccaggatcagttgcaagcacaaatgcagcaacaacagcagcagcaacagccgcccgtcaagaagaccaaggagcagcagaagaaggaattgcttgacatggaactggagctaatcgcccagcaacaggagggcaacgacactacagccattcagaagcgattggaggagttacagcgcaatcttggtgttggctcagctgcgaataacaagtctacccactatgcacctgcttccggggcacccggtggcggtgcaggacgcaagcgtccgaatctgccggagggacccactcgtgtcgacaggcggccaaaggccatcgtggtcactggctttgcggccgaagaggcagactttgtcctcgggcactttaaggtaagcctaatgccgagttctcaaaatgagattgtttgatatttttggttttggattgcaatgaacatgtatttttcgtgtcttttcacagaacttcggcgagatttctaagcatgatgtagaccgtgagattccacagttaatactctcatacgcaacccgtctcaacgccgaacaggctgtgctccggggcaaaatgtacaaagacaagcgcctgcaggtgagtgaacgacaaaggctgcctctgccgtgcgaattcggcagcatattaactctttgtacaaccacagatctcgtgggctcccgtggtgactcccgctccagctccaatggccgcccctgttgagaagtccgctgcaccaggtgacatgtccgttagcctagagaaccccaaacaattaatccagtccgtcagtgagagcgagagtctgttaggcagcgacacgctgccggagctgcgcctggaagatgaggaggaggatgaggagtccgaggatcgctcctggcgtcgttgatccatcgccctccgctgttgaggcggccgggaaagttccgtggggctcacaagtgttaggaaacccttaacatgtatttgttgttattctatatctaactgctgagtgtgtggcagtgctgagaatgaacgaacactttgcacacttcaattaaacgctctaaatattactaatattttactgaacataagttatgaatcgcctaaaaatacgaatgagtttagctaagcctaagtccgaaataacaacactgaaactacaacttcaacagcgaaatgcaaccaaactccaaggctcgatgcgaaaaagcgcgagacaaaacattggttaaagatcgtgaactacctttgtatttacacatttttcactctatccttttcttatatacaaatatatatacgcggatatataattgttaagattttatgttgagttaaaacgataaaacactaaaagaacaaaaaaattgcaaagaaaaaatccccaaaaacaagcgcaatgaaagtcaaaaaaagaaaaaaatcgtagcaacgtgaatgcaaaacagcaagttatatagagagatataataaataaaatagtttcgtatttcaggagaaacaatgtctatttttggttaaagggtggcagtcataccaacagagaaaaattgctatttgattggtggtgttacttctaaattcaattttttcaaaaggcgcgccactttttatcggtgttaccagctggattgacagctgcgctgccaagaaatcgatgaccgaagaaaaaacttcgataaattcatcgatgttcttcctcttcatatggcgcgatcaaaagtttgtttttactctactgcgaatttatttgaatgaaagctgtcttaacatgttttcgccccgtcgtcgcctcacacagaagatattgcgctaatcccggccaggcaatgaagtacttaaacgtggctgagaagaacgacgccgccaaaacgattgccggcctgctgtcaaatggcgcagcacaaagggtatgctattcaatttggtgggaattgtaggatgcaaacacaacttatttgttttcctgcccacagcgcgaaggctactcggtgtacaacaaggtcttcgatttcgaggcccctgtgcgcggtcagaatgccaaaatggttatgacctccgtatccggccacatgatgcagctggcattccaggtgtcttacaaaaattggagaacggtggatccgcgctctttattcgacgcgccggtgaaaaagggcgtgggctcggattatgagcctatcaaaaggaccttggaacgcgaggtgcgcggctgtcagggattgattatctggacggattgcgatcgcgagggcgagaacattggctacgagattattgatgtgtgtcgcgctatcaaaccgaatatttcggtttatcgtgccactttctcggagattaccacggtggcgg

SEQ ID NO: 42281 - DNA, 3992 bp, DROSOPHILA
cctagactcgtcaaaagcaaccttgcaacaggaaaagtgcagtgaaaaatataaaaatagctgttcaaaccacaatttgttgtacaaatcttaataataagttaaatttaagcattgagagattaaaagcagaagcaacggcggtaacaggaagtaagaagttcacccaaatcgcaggagcacagtcgccagagcgacagaggtcatcttaaaaataatttttcgggcgtgtttgccccccgagcacgattaaccccccacccagattagcgcagaccaacgcaagaagcccccaaccaaaaaacaaaaacaacagcagcagcagcaagcagtagaaacaacccgccttagcatgattctggagaattcggacaagctcaaggattggctgagcgtggtcctggagccactctgcgatgcggactcctcggccttggcgcgatatgtcatcgcgctgctcaagaaggacaaatcggataaagaccttaagcggatcatgatcgaacagctcgatgttttcctgtccgaggagacgacacgtttcgttgaacgcctcttcgatgccattgccagcgaggaatacctgacggtccctgctgcccctctaataacagcctctagtgcatccaccgctgagctaacagtcgaccaggaactggccctggtcattgatgggccccaggacgacatcgaagcggttttggttgccgattcccctccaccgcctcctaaagataatgtgataaaacccgatagcaatcaggtcaagttagagcaggccagtcaagatgccagggaagctgaggccctagcttttatcagccaggaagccggcattgccatgcacgtccctacagatgccaagccagcctttgatcataaaaccaaagactcccacaatcaacagtcagcctccaactaccaacaccatcatgtgcgcagtgccagcccaccgggcagaagcagcggcgtcagcggaagtggaggaggtggtcccggcggagcaggtcttgcggcgggttatgctgacaaggaaaaccagccgcgcgacagtcgacgacgacgtgcttccctgcgatcccgttcccgctctcgatcgcgttctaacgagcgcgcttttcggcggtccaggtcacgcgaccgacgggtgaacgaacgcgagaaaactcaacgacaattccgtaacaaatctccaccaggctcgcagaccgacaatcgccatcatggtcggcgcaactttgatcgccggcgcatcggtggcaacgcagatgatcgtcctcgatttggcaacaataagagccggcgctctcacagtcggtcaatgtcaccggaacgaaacgcgcggcgcaaccagaactccccggaccgagtacaaacagcccaagctaacctaattcccgctccagtggcgccgccagcacccgttgagcatccggcttcccatcctcgtcagcgctgccgggactttgacgagaagggctattgtgtcaggggtgaaacatgtccctgggaccatggcgtcaatccggtagtgttcgagggcatcaacaacacgtccctcatgatgtcaatgcgcgagtacaatccggatgcgcccgaaatatgggctaggagcggaggtccgccaccaggagctggtcagggaccagtgcctccaccaacgcaaccaggacagaccaccattaaccccttcagcggtaatgtgcgaccaaccacgctaatgagcggctctgggcccagtccgatgggcgttccgaatcccgctgactacgcgcgcaatccaggcgctccgccgcaggcggccatgatgccattccctttcaatcccactgcggttaccactcccttgcagcggcagctgatacctattcccgtggttgatggcgctcccacgggaggcgttgctgaggttggtaagcgacgtttcgaactggaggatacagtggccattgccgatgtgccaacgaaacgaaaggtgccgatcaacagtcgtcttggcccgcgtgtcaatcccaacatgcagcagcataacagttcgctggagctgaggaaggtaccgcgcggacttaacaccatcgctcatttgaacaaccactttgctaagttcggaaagatcgttaacattcaggtttcgtacgaaggcgatccagaggcagctatcgtgactttttccactcatgctgaagctaatgtggcctacaggagcacggaggcggtgctaaacaaccgatttattaaggtcttctggcataacgacagcagcggagcggatgtgggacagatgaaccagatgggcggcggtggaggaggcggtggacggaagaacgccagccagtaccatctgcataacgttccggcagtgccaacacccaatgcggatggtgcgaagatcagcaatgccaatcctctgactgaggcgggagctggtaacattggcacccctgccacggaacaggccaacacagcggctccggcatcaatgcgtctcaagctaaatacaacgacagctggcggctcagctggaggagcagctggtgcgggagcaccgggatcaggtcgtcctttgaaccctgccgccaatgccgctagcatacgcaagaagcaggaggagcagcagaaagcagttcaccaactggctaacgggttgcgcaaacgcaaacaagaattgctccagagctatatgaagcagatgaagactgctctggaactggtggagcgaatggaccagcaggatcctcagagggcccctactctgcagacaataaaggtgctgcagatgacaatcgacaaactacgaaaggaaatcaaggccgaccaggatcagttgcaagcacaaatgcagcaacaacagcagcagcaacagccgcccgtcaagaagaccaaggagcagcagaagaaggaattgcttgacatggaactggagctaatcgcccagcaacaggagggcaacgacactacagccattcagaagcgattggaggagttacagcgcaatcttggtgttggctcagctgcgaataacaagtctacccactatgcacctgcttccggggcacccggtggcggtgcaggacgcaagcgtccgaatctgccggagggacccactcgtgtcgacaggcggccaaaggccatcgtggtcactggctttgcggccgaagaggcagactttgtcctcgggcactttaagaacttcggcgagatttctaagcatgatgtagaccgtgagattccacagttaatactctcatacgcaacccgtctcaacgccgaacaggctgtgctccggggcaaaatgtacaaagacaagcgcctgcagatctcgtgggctcccgtggtgactcccgctccagctccaatggccgcccctgttgagaagtccgctgcaccaggtgacatgtccgttagcctagagaaccccaaacaattaatccagtccgtcagtgagagcgagagtctgttaggcagcgacacgctgccggagctgcgcctggaagatgaggaggaggatgaggagtccgaggatcgctcctggcgtcgttgatccatcgccctccgctgttgaggcggccgggaaagttccgtggggctcacaagtgttaggaaacccttaacatgtatttgttgttattctatatctaactgctgagtgtgtggcagtgctgagaatgaacgaacactttgcacacttcaattaaacgctctaaatattactaatattttactgaacataagttatgaatcgcctaaaaatacgaatgagtttagctaagcctaagtccgaaataacaacactgaaactacaacttcaacagcgaaatgcaaccaaactccaaggctcgatgcgaaaaagcgcgagacaaaacattggttaaagatcgtgaactacctttgtatttacacatttttcactctatccttttcttatatacaaatatatatacgcggatatataattgttaagattttatgttgagttaaaacgataaaacact

SEQ ID NO: 42282 - protein, 1062 aa, DROSOPHILA
MILENSDKLKDWLSVVLEPLCDADSSALARYVIALLKKDKSDKDLKRIMIEQLDVFLSEETTRFVERLFDAIASEEYLTVPAAPLITASSASTAELTVDQELALVIDGPQDDIEAVLVADSPPPPPKDNVIKPDSNQVKLEQASQDAREAEALAFISQEAGIAMHVPTDAKPAFDHKTKDSHNQQSASNYQHHHVRSASPPGRSSGVSGSGGGGPGGAGLAAGYADKENQPRDSRRRRASLRSRSRSRSRSNERAFRRSRSRDRRVNEREKTQRQFRNKSPPGSQTDNRHHGRRNFDRRRIGGNADDRPRFGNNKSRRSHSRSMSPERNARRNQNSPDRVQTAQANLIPAPVAPPAPVEHPASHPRQRCRDFDEKGYCVRGETCPWDHGVNPVVFEGINNTSLMMSMREYNPDAPEIWARSGGPPPGAGQGPVPPPTQPGQTTINPFSGNVRPTTLMSGSGPSPMGVPNPADYARNPGAPPQAAMMPFPFNPTAVTTPLQRQLIPIPVVDGAPTGGVAEVGKRRFELEDTVAIADVPTKRKVPINSRLGPRVNPNMQQHNSSLELRKVPRGLNTIAHLNNHFAKFGKIVNIQVSYEGDPEAAIVTFSTHAEANVAYRSTEAVLNNRFIKVFWHNDSSGADVGQMNQMGGGGGGGGRKNASQYHLHNVPAVPTPNADGAKISNANPLTEAGAGNIGTPATEQANTAAPASMRLKLNTTTAGGSAGGAAGAGAPGSGRPLNPAANAASIRKKQEEQQKAVHQLANGLRKRKQELLQSYMKQMKTALELVERMDQQDPQRAPTLQTIKVLQMTIDKLRKEIKADQDQLQAQMQQQQQQQQPPVKKTKEQQKKELLDMELELIAQQQEGNDTTAIQKRLEELQRNLGVGSAANNKSTHYAPASGAPGGGAGRKRPNLPEGPTRVDRRPKAIVVTGFAAEEADFVLGHFKNFGEISKHDVDREIPQLILSYATRLNAEQAVLRGKMYKDKRLQISWAPVVTPAPAPMAAPVEKSAAPGDMSVSLENPKQLIQSVSESESLLGSDTLPELRLEDEEEDEESEDRSWRR

SEQ ID NO: 42283 - DNA, 4778 bp, DROSOPHILA
tcggaaagctgtggaagtggatgctgatgaggggacatgcacggtggcggggcggtgaggggccacgatgcacttgggactggtttttttcggaggccccaagaccaagagttcgggggctgctccgttgaatatttcggcaatgaccaaagtacagcagccagagccatattgttgctagccagtcagccaaccatacagccagccagcatccgacgtctagtttccacattaatatacgtaaatatcaggccacaacagtggagccactttacctttcgccaggtgtgcgccttcaaatcctcgctggaatcctgctcctcagctgtacggcgatttatcctcgctaattttcaccgacttttcacgatttgcgctgggaaaagcgggggttcgatgatttttggtataattgcaataatagttcagttcgcgttagagctggaagatacgtcgatgtaacatcgatggccaaagtcatcagtctgtattcacatcgatatttgctcagccttaccaacactaatattgttcagcggtgacttaagcccacatataacattagcgttgactcgaaccatttttagaaaacttaatgtacaaacaatgtaaacatacctaacaacctaaaacatattatttgtcaatagtatttgcaaagtatattataagcaaatataaaggttatgatatgaataaacaccatataccagttttttccattggatagagatacaaaaaagttgaataaaatataaaaacgaaaaatgttcgtatgtgtgattattaaaaaagaagataatgcttatatatatagttgaaactttacgactaacacctataagaaaaacgataaagtaaatcaaagcctattagacgaggtacacgttactagatacgttctaaaacctctgttatttaatttcaattttacaagtaaaaaccatcgatagcggcacagtggcaacattgaaagtatcgattagacatcgcctgttgtcccagctctagtttgttgttgcaaaaaaagtgtgtgggtcgccgccagcgatcgaatattttaaaattccaatcaaattggttaattggggagttgcaattgcttgagcgttaagttaaacctatttctgcacgcataactcgaaggattaaggtggaaaagtggaatttggaaagccgctggaaattcgcacatactggaaaatcaatcacccactatcccattgttctgcttgtgtttgtgtacgtctgtgtgcctttgtgaggcggctgcacttaattaaaatttaagacaagacaacccaagcaaatttggagtcttcgcgaggcgttggctttcacttgacgaagagggcaccccgataaggcgacccagtgaaagctggccaagatctcgctgctcaaggtcgttgtcagtctggaattatggccgtcagcttcgagaagaatcgggcgcaaatagtggccgcctggaaggatgtgctggacgataagagcgacacgaactggtccctctttggctacgagggtcagaccaacgagctgaaggtggtggccaccggcgatggcggcgtggatgagctaaacgaagacctaaatagcggcaagattatgtacgccttcgtccgaatcgaagaccccaaaacgggcctcaacaagtacttgctcatcaactggcaggtgagtccgacggcgcccttatctaatcgagctacgcataatctgactgtgctcccattcagggcgagggcgcacctgttctacgcaagggtacctgcgccaaccacatacgtgatgtgagtaatttgctgtccggcgctcaccttaccatcaatgcccggaacgaggacgatattgacttggatcggcttctcaagaagctgagcaccgtgagctcagcctacagctttaaggaacctcgaggcgccatggaggagcagaaggcgccggtgggaaccaactatactcgggtcattcccaccaaggagttaaacgccagcgttatgcaggacttctggaaaaaggaggaggccgaggagaaattgcgacaggaggcagagaaggaatccaagcggcttgagcttcaaaagttggagcaggagcaacgtagtcgcgaggagaaggagcacaaggagcgggagaagttggtcataagcaccaccaagctccagccggcccacgtacccatcaaaacgtaaacaaaaacatcggaatttgaccttctcggtagtaaaaattctttttttatcaaacaggtcaccgcaacctttgagccctgagaaaactgcaccaggatttgccaacaatctgaccgatgcggagcgcatgcgtcaggcgaggaaccaggaggcccgcgaattgattggctctcgtgtgggtgctgccaaggccatgtttacaaagcacacgagcgagggacaacttcagtctaagtgcgtccttgcccctctcctattttgttgtatcagaaataaactgctcttttgattcatagactaaatacgcaaccgccggccaaaccagctcgcaactcgattgcccagcgcatcaacgttttcaaccaaaaccagcctcaagatgcacctgtgccttcaccaccacgcgctgcgtcccctgccaaaccgttgcctgtagaggctcccgaaccagtagtccccgctccagctatagctcctgctgctcccgtggctgccgaggttgtttccacaatagcggaggtggaggagtcgcaaccggtagacgatttgccactggcccatgagagcgaacagttctcgactatcaagcgatcaccccatagtaaatcgaactcgctgcagtctcagtcgcccgacgagaccacctcttccaatgaaacagacaccgctgtttcccaggaacaggaagaggaggtccgcaccaaggtgtcagtcaccgtgcagcagtcgcaatcggtcaagtcgagcggcatgagcacactcgaaaggaatgcatgtacgtaaaccatagctatgacccgttgttcgttctatatttaaacacgagtgttttttgtagtaacggatttggtaaacgaggacgattttatctgccaggagaccttaggcgatctgggacaacgggcacgagctctatacgattaccaggcagccgacgagacagagatcactttcgatccaggcgatgtcattacgcatatcgatcaaatcgacgagggatggtggcagggactgggccctgatggaacctatggactgtttccggcaaactatgtcgagatcatcaactagggaaacccaagtgccaagcagctgggacgcccttttgctaaatatctacaccaatgcagctagcaactatattttggatccggactatagctacttaaacactttaccccataatcttgaacaataatgcgatacacctagaagagattcaacgatgactaaatgcgactataagatttttatcgtacatcacgcgtctgttttttatctacatacatattattatataacgtataatccatgccacatatgcaaccctatcatacgttgttcccatttgtatacatattatatcattgtttggcctcgattgccgaagccgtgttgcgtccttttaaaatgttcttaggatacatacaaagtaaccacttagtcagtatttaaggcccgctccattcccgatccagggttcttttgtatatgtattattgatcgagatttataaccttttcgataataaactttgataattgtgcaaccgaaggataacacagttttatggtcaacaatatctacatttattttcgcattaattagtagcataaatagttatcatagttttttttttttttctataagagtttacgttcgtttaacaattcacctgcagcaaagccgtgagtggtgcactcggcgtgattggatggatgagttggcctgtggcaagcaagcgcgtctgctgtagatttgtatgagatcatacggcggcttgctgcccctgttgctgctcatcggtacaatttacgtataaaaactggactcaggttcaaaaatatcctcatggtgatcatctatcgcttaaacataatcagctcttttaagtgaagcaacccttgttgccaaatcgttttcgctctgttaacttccgaattctatgcaggcacattttctcaatattaattctcttactagcctataatctacgctgtgtggtgtgtgtgtgtgtgtgtgtgtgttatgatgtgtggggatgagtgggtgttgagtggttgacacgtgagatttgcatatgtttagatagtacggttgtgcttctacgaaatactagcaaagattcgtcgccagctcctcctattcacattcacattacacatcaaattcactttcacatttactttgaattcagtaaaatcaagtctgtcgctgtccgttgatgagtcgggatcggaactcttctctatcctccgcctgttgtcacttaaatttggttaatttgcgtagctgcttcgaaacggtcgccttgtagaggcgctgtgttcatcattccgacgtcgttgtggttgtctccgactgaacggcggactgtgtcgcctccgcggcggtggcttccgaagcagctgcgccctcgacggcagcagcatttggtggtgctggtagagggatgggttcctgcatctttgtagcatcctgtggctgtggagtcactggctccgcattttgtccggccgcttccgaggcagcaactgcacctgtgtcaaccgctggagctgttgcgctaggtgcaggtgc

SEQ ID NO: 42284 - DNA, 2530 bp, DROSOPHILA
cccagctctagtttgttgttgcaaaaaaagtgtgtgggtcgccgccagcgatcgaatattttaaaattccaatcaaattggttaattggggagttgcaattgcttgagcgttaagttaaacctatttctgcacgcataactcgaaggattaaggtggaaaagtggaatttggaaagccgctggaaattcgcacatactggaaaatcaatcacccactatcccattgttctgcttgtgtttgtgtacgtctgtgtgcctttgtgaggcggctgcacttaattaaaatttaagacaagacaacccaagcaaatttggagtcttcgcgaggcgttggctttcacttgacgaagagggcaccccgataaggcgacccagtgaaagctggccaagatctcgctgctcaaggtcgttgtcagtctggaattatggccgtcagcttcgagaagaatcgggcgcaaatagtggccgcctggaaggatgtgctggacgataagagcgacacgaactggtccctctttggctacgagggtcagaccaacgagctgaaggtggtggccaccggcgatggcggcgtggatgagctaaacgaagacctaaatagcggcaagattatgtacgccttcgtccgaatcgaagaccccaaaacgggcctcaacaagtacttgctcatcaactggcagggcgagggcgcacctgttctacgcaagggtacctgcgccaaccacatacgtgatgtgagtaatttgctgtccggcgctcaccttaccatcaatgcccggaacgaggacgatattgacttggatcggcttctcaagaagctgagcaccgtgagctcagcctacagctttaaggaacctcgaggcgccatggaggagcagaaggcgccggtgggaaccaactatactcgggtcattcccaccaaggagttaaacgccagcgttatgcaggacttctggaaaaaggaggaggccgaggagaaattgcgacaggaggcagagaaggaatccaagcggcttgagcttcaaaagttggagcaggagcaacgtagtcgcgaggagaaggagcacaaggagcgggagaagttggtcataagcaccaccaagctccagccggcccacgtacccatcaaaacgtcaccgcaacctttgagccctgagaaaactgcaccaggatttgccaacaatctgaccgatgcggagcgcatgcgtcaggcgaggaaccaggaggcccgcgaattgattggctctcgtgtgggtgctgccaaggccatgtttacaaagcacacgagcgagggacaacttcagtctaaactaaatacgcaaccgccggccaaaccagctcgcaactcgattgcccagcgcatcaacgttttcaaccaaaaccagcctcaagatgcacctgtgccttcaccaccacgcgctgcgtcccctgccaaaccgttgcctgtagaggctcccgaaccagtagtccccgctccagctatagctcctgctgctcccgtggctgccgaggttgtttccacaatagcggaggtggaggagtcgcaaccggtagacgatttgccactggcccatgagagcgaacagttctcgactatcaagcgatcaccccatagtaaatcgaactcgctgcagtctcagtcgcccgacgagaccacctcttccaatgaaacagacaccgctgtttcccaggaacaggaagaggaggtccgcaccaaggtgtcagtcaccgtgcagcagtcgcaatcggtcaagtcgagcggcatgagcacactcgaaaggaatgcattaacggatttggtaaacgaggacgattttatctgccaggagaccttaggcgatctgggacaacgggcacgagctctatacgattaccaggcagccgacgagacagagatcactttcgatccaggcgatgtcattacgcatatcgatcaaatcgacgagggatggtggcagggactgggccctgatggaacctatggactgtttccggcaaactatgtcgagatcatcaactagggaaacccaagtgccaagcagctgggacgcccttttgctaaatatctacaccaatgcagctagcaactatattttggatccggactatagctacttaaacactttaccccataatcttgaacaataatgcgatacacctagaagagattcaacgatgactaaatgcgactataagatttttatcgtacatcacgcgtctgttttttatctacatacatattattatataacgtataatccatgccacatatgcaaccctatcatacgttgttcccatttgtatacatattatatcattgtttggcctcgattgccgaagccgtgttgcgtccttttaaaatgttcttaggatacatacaaagtaaccacttagtcagtatttaaggcccgctccattcccgatccagggttcttttgtatatgtattattgatcgagatttataaccttttcgataataaactttgataattgtgcaaccgaaggataacacagttttatggtcaacaa

SEQ ID NO: 42285 - protein, 531 aa, DROSOPHILA
MAVSFEKNRAQIVAAWKDVLDDKSDTNWSLFGYEGQTNELKVVATGDGGVDELNEDLNSGKIMYAFVRIEDPKTGLNKYLLINWQGEGAPVLRKGTCANHIRDVSNLLSGAHLTINARNEDDIDLDRLLKKLSTVSSAYSFKEPRGAMEEQKAPVGTNYTRVIPTKELNASVMQDFWKKEEAEEKLRQEAEKESKRLELQKLEQEQRSREEKEHKEREKLVISTTKLQPAHVPIKTSPQPLSPEKTAPGFANNLTDAERMRQARNQEARELIGSRVGAAKAMFTKHTSEGQLQSKLNTQPPAKPARNSIAQRINVFNQNQPQDAPVPSPPRAASPAKPLPVEAPEPVVPAPAIAPAAPVAAEVVSTIAEVEESQPVDDLPLAHESEQFSTIKRSPHSKSNSLQSQSPDETTSSNETDTAVSQEQEEEVRTKVSVTVQQSQSVKSSGMSTLERNALTDLVNEDDFICQETLGDLGQRARALYDYQAADETEITFDPGDVITHIDQIDEGWWQGLGPDGTYGLFPANYVEIIN

SEQ ID NO: 42286 - DNA, 4963 bp, DROSOPHILA
tggctgatcaattgcctccgatacctttgaggggatgaagaggctagattgactgctctaatttcgtaatttccccgtttcggaagtggatgggtgggtgggcttccatccaagccaagtccggctgactggtaaatgacagctgcttctgctggcgcggcacacacgtgccttatctgctccaggtctcctggtctcccactcttctgcttttgagcatgtcagtcaatttaatgcccgtggctgcgacgacaacgtgccgggaatgaaattacaacaaagcgacactttgcccattgcctcaacgcgagacaacttatgcaaatgtgtcggattccaagtgcacccaaaggatgggtatccgagtgtgttacacaacgtaggctcatagctggtgggctgcccacgtcttgactttgtgatgaggcctttgccattgtccttagcggggtagcaggaaaaaaagaggggaaaaagaatagcgggcccaaccaactgttgcaaggaccccgtcttctaaccttgcccacttttgggggccaaacaggtaggccagttggtggtgcttagcctctggcatttcggcccattccgatccaaaatcctagcctcgataccaggacaaactgtctgtctgactgtcccactaatgagatgcagtcgagccaacgtcaaggtctgtttacttccgcgacgaaggcggcgacaaagacatccattatgttttggccatggcagtggcttgcaacagcttgcaacatttgccacttgcactttcatcacagcccacaacaaaagcatttagctgcccccaaaacccatacttgcaatagcattcacaatcacactgccatttccttttggccttcgccgggaattttgcgcctgaacttgtcaaataaaggattctcttcctctgcttcttaccatttcagcaatgcttttgggccaattcgtttgacaattgaggaagtgagccgcaacttttaaatgaagaaacatggggaatggcatgaacaaggtaagaacgaggacaagatttatgactgacaaaaacacaaacagaagccgatgacaaccgttttcaaggtcctacacaaaagttaagcagccataattgcagtattttcagaaccaaaatggtcaagccttgcaaccagacattcatatctttcagataaagtatcttacatatgtatattttttttgttaaatatcacataaaagccatgagcaaacatatgaatagatacattttaattttgaaataataagtaattataagaaattttttaccttttagtaggttgactttatgttattgaaataacttttagaatatttagtcttcggcttaaaaaagctagtaatttttgactgcactggcagttcggccgtatagatcggtgattcaatatcgataaacaaactggttccgcaataatgtggaattggtgctctggtaccaacttttcagtctgcgtctacgattgttgtcacggcaacttgtcaatggcaacgaaaactgaacgacacgcaagaaatccaataaaataggctaccatttttccgtctccatgaacagcactctaaatcgtaggcacaccaaatcatatcatattgctatctgatcgcaccaaaatgaactggcacatgggaaaggtaaaccaggagcagccatagcctaatccctgaaacatctggttttttccctccatttcttctaaggtcttgccgggactttatgtgggcaactatcgcgactccaaggatcacgctcagctggaaagattcaagatctcgcacatcatcgccatacatgacagtccgcggcgtttgctgccggtaagttaattgttttccgcattctgggatgtccactgaagttatattctactcctaggacaagcactacctgtgcgtgatggcctcggatacgccagaccagaatctctcccaatacttttccgtctgcaacgacttcatacacgccgcccggcttcgcgaaggcaacgtactcatccactgcctggcggggatgtcgcgctcggtgaccgtggccgtggcctatatcatgacggccacacacctgaactggaaggaggcacttaaggtggttcgagctggtcgcgctgtagccaatccaaatgctggattccagagccaactgcaggagtttgagcagtttaagctgtccgaggaacgccgccgcttgagggaacgcttcccatcctcggctctggagcaactggatcgcactaaggtggccaccgcgctggacaactaccaggagttgctgcagaaccgcgacatctgcgagggtaactgctcccgcggcgaaaaatgtcctacaggtgcggaccaagacgtagatggtgttaatattggtcagggggaggaagaagacgagggtgaaggcgagggcttgggcaaagtcaggcgaagcttggcttacactctaaactttgcggtggaccaatggaagagcagtaccattaaaaaggatccgaacaatgaccccccaccggattttagcttgggcaaggaccttatgccaagtgtgcgttactacgatccggagtgcgacaagggtcaatttgttaagaatgtggattcggacaatgatgaagaacagtatattgctttcaagacctcaacgaagctagaagccaagtccacgtcaaaattaaaaaaacgacgtgtaccaaaatcggaatcctgcaaccaaagctgtcttgagaagccatagttaccacaaataaaataatcatccgcttcaagtcacgtataatttatgctctactattccttaatatagcagagagaaaattagatttattacatttaagctttgataaaaagttcgagaattatttaaaatgcgtattcatgatcatgtcgtttcccatggtttttttccgcgcaggcgtctgcaacatggaccccacaaagggcttgttccgacgtcgtccctccaacgcctccactcactcgcgtctgcgtgcccagtcctccaacgccaacgcctcgtccagttcacttagcgtaagcagtgccgccgcccaatcctgccccacatcgcccaagaactcaccgctgcccatagtccgtcgttcggtgggcaatgagcgcatacccgaggacgagatcgtcctggaacagccgcccaccacatcccgtgaggctgccgagtatgccgccgccttcgaggatgctcgccgtgagcaggagcagcgccaactgcagcagcagcagcagctgtccaggagtcagcgctctccccggccggtcaactcctcaagggaagcgcctcgggtgagtagcgccggcagtcgaagggagtcggcggccagggagggaaatggctccgcacagctgcaacggagtgccagcacggtcagcggtttcggagtgcgtccacggagtagtccggctggactgcacgcttacacgggtgaggtccttaagttggttgtaaacgatgaagcggtaaagaaatatgtctgttgtatttgtttcgtttaatttgtttcaacattttaaaagttgttgattaaataagtcagacgcttcatcgtttacaaataacttccggagattctttagtaagttggtttttaaggtatacaataaaatggtttttcttgacctctgttaggatcggttccttcctccgtccacggttcccgagtggatttgcgtgatgctgacaagggatcggccatatatctgggctgttcggcaccgagggcctccacgctatctatatcctcgtcgagaggctcgtcgggaggctcggctccaccctcaccatgccacactccacccgccagtccacgtcatggcgttaaaaggtcagtgctcaatgtcctgcagctatttggaaaccaaaactttctaccaccacagatccaccagtctggtaaagaagccgagatgaagtccagagcaagccgtcattaggcgaggagaattttttgtaatgcgagttgcattggcacccactgcatataatctgtaatccttaagcgacttgcaccctttggcaaaatgcgctcgtgacctgcagacttgtttggaaggggaccatggattcccgcttgggattcgtaggatcctcgagtagcttactgttgttagacgcttgggctgaggaatccttcgttttcggctttggctactaaaagttgttgatcaattttttaaaccgcattcggggcactcgccttcgagtgcagcctgaattaagaaaatcaaatgttgggagattatttttcagagacgcatttaagaaataccgacatatacatatacacacatatttactgtatattatatagcgtatttatttatacgagcagatttgttgtcagtccatttggaaggactgattccccggcctcctggttatggccatttgttagttttgtaccgaaagatggatggcgtgtgcaagcgattgtggagacagtcgaacaataattgagaattgtacaattgcgtatttttgattaaacccactgttgttgcaaatattttgatagcgaaccaaaactaattgggcaaaccccaaggcaagcgttattatacattcatacatacctagttgatattagtattgacatatgagatttgagattgttatttagagttgttgcattgtgtagcattgaatatataaacaaagtttattagctcaccccaccctctttcttccacacgccaagcaaatgaaaaaaaaaaaaaactcgagatgaaaagcaatacagagcggacttttccacattagatcacaaaacaaaatttaaccaaaacaaacaaatcgcattaaagtgtgctttaaagcttgtggcttatcataatgaaaccaaaacacaattcaaattataatcgataagaatgtaaaattatttacaatctttcctagaatatcgaaaacaatctaaaggacatttgagacatt

SEQ ID NO: 42287 - DNA, 1827 bp, DROSOPHILA
atggggaatggcatgaacaagacaccaaatcatatcatattgctatctgatcgcaccaaaatgaactggcacatgggaaaggtcttgccgggactttatgtgggcaactatcgcgactccaaggatcacgctcagctggaaagattcaagatctcgcacatcatcgccatacatgacagtccgcggcgtttgctgccggacaagcactacctgtgcgtgatggcctcggatacgccagaccagaatctctcccaatacttttccgtctgcaacgacttcatacacgccgcccggcttcgcgaaggcaacgtactcatccactgcctggcggggatgtcgcgctcggtgaccgtggccgtggcctatatcatgacggccacacacctgaactggaaggaggcacttaaggtggttcgagctggtcgcgctgtagccaatccaaatgctggattccagagccaactgcaggagtttgagcagtttaagctgtccgaggaacgccgccgcttgagggaacgcttcccatcctcggctctggagcaactggatcgcactaaggtggccaccgcgctggacaactaccaggagttgctgcagaaccgcgacatctgcgagggtaactgctcccgcggcgaaaaatgtcctacaggtgcggaccaagacgtagatggtgttaatattggtcagggggaggaagaagacgagggtgaaggcgagggcttgggcaaagtcaggcgaagcttggcttacactctaaactttgcggtggaccaatggaagagcagtaccattaaaaaggatccgaacaatgaccccccaccggattttagcttgggcaaggaccttatgccaagtgtgcgttactacgatccggagtgcgacaagggtcaatttgttaagaatgtggattcggacaatgatgaagaacagtatattgctttcaagacctcaacgaagctagaagccaagtccacgtcaaaattaaaaaaacgacgcgtctgcaacatggaccccacaaagggcttgttccgacgtcgtccctccaacgcctccactcactcgcgtctgcgtgcccagtcctccaacgccaacgcctcgtccagttcacttagcgtaagcagtgccgccgcccaatcctgccccacatcgcccaagaactcaccgctgcccatagtccgtcgttcggtgggcaatgagcgcatacccgaggacgagatcgtcctggaacagccgcccaccacatcccgtgaggctgccgagtatgccgccgccttcgaggatgctcgccgtgagcaggagcagcgccaactgcagcagcagcagcagctgtccaggagtcagcgctctccccggccggtcaactcctcaagggaagcgcctcgggtgagtagcgccggcagtcgaagggagtcggcggccagggagggaaatggctccgcacagctgcaacggagtgccagcacggtcagcggtttcggagtgcgtccacggagtagtccggctggactgcacgcttacacgggatcggttccttcctccgtccacggttcccgagtggatttgcgtgatgctgacaagggatcggccatatatctgggctgttcggcaccgagggcctccacgctatctatatcctcgtcgagaggctcgtcgggaggctcggctccaccctcaccatgccacactccacccgccagtccacgtcatggcgttaaaaggtcagtgctcaatgtcctgcagctatttggaaaccaaaactttctaccaccacagatccaccagtctggtaaagaagccgagatgaagtccagagcaagccgtcattag

SEQ ID NO: 42288 - protein, 608 aa, DROSOPHILA
MGNGMNKTPNHIILLSDRTKMNWHMGKVLPGLYVGNYRDSKDHAQLERFKISHIIAIHDSPRRLLPDKHYLCVMASDTPDQNLSQYFSVCNDFIHAARLREGNVLIHCLAGMSRSVTVAVAYIMTATHLNWKEALKVVRAGRAVANPNAGFQSQLQEFEQFKLSEERRRLRERFPSSALEQLDRTKVATALDNYQELLQNRDICEGNCSRGEKCPTGADQDVDGVNIGQGEEEDEGEGEGLGKVRRSLAYTLNFAVDQWKSSTIKKDPNNDPPPDFSLGKDLMPSVRYYDPECDKGQFVKNVDSDNDEEQYIAFKTSTKLEAKSTSKLKKRRVCNMDPTKGLFRRRPSNASTHSRLRAQSSNANASSSSLSVSSAAAQSCPTSPKNSPLPIVRRSVGNERIPEDEIVLEQPPTTSREAAEYAAAFEDARREQEQRQLQQQQQLSRSQRSPRPVNSSREAPRVSSAGSRRESAAREGNGSAQLQRSASTVSGFGVRPRSSPAGLHAYTGSVPSSVHGSRVDLRDADKGSAIYLGCSAPRASTLSISSSRGSSGGSAPPSPCHTPPASPRHGVKRSVLNVLQLFGNQNFLPPQIHQSGKEAEMKSRASRH

SEQ ID NO: 42289 - DNA, 3877 bp, DROSOPHILA
atttaatgccattctatgttagctccgtaagttgtaaattatcaatataaactacacgtaaaaagaacaaacacaaaacaaacagcaaccagtgagaatgtggaaaatgaaacaaataaattaaacaaaacgatttaaataatttaaaagatgcctttggattattaatgtgaaatagttggtttcggaattgtaggtaattcgaaaggatagttttgcggtactcttaaaatagcagtccttcgttctacatttttaatagcaatattctccatttggcgccatactttcttggcttaggaagtatcttgttccaagaaagccaataaaacgttaagtttttcttgccgtgctatccaggaataaaattttcagtggaaattcaaaccatacaaatgtaaaggtatattttacacacgtgtaatgtagacttcgtagtttctacatcttacgctatgcgtagaacggatggaaatgaatatcgatctgaaaaagattacggggaagccaatccttatttcgaagatctggcagcactagcgtcaaaaaatttaatttccaaaaaaattgagaatttaaaaaaaacgtaaaatttttttttggtgtttataagattgtcatttttatttaagcgtttttattaattgaataaatttttacgactgactttttatgtaaaaaatgatatcggtacatttcgaaaactacttctttaaaaataaaagaaattgatttttcaattaatttccttaaattctttcaaaagaatttagctaaacgcccacttttagcgcggactcaaaccattgagagaaaagtctccaaaatgaatttggtaaaagtttaatacacgagagaatgctatagtcgacttccccgacaatcagatacccaatactcaactagtggaagtgcgaacacgaaatttcatattttatttttctgcgatatcgatagatattgatgaatgaaatgagatataaatactacactcactcgacttatattatgaactgcagctctaagcactccaatcgatactgatgaggtgctcttaaaacgtgttttcagattggtatgagattcggcttgaacacattggagctcagttcgctttgtaagctcggtcggagtcgttcttagctcggcggcaagtgctttccagacgactttaatcagcacgcacttgttttaggcatacctatgtgattgccttgtgcacctggatcgagtgcataacagtgcatcagaaataaggattatgcaactaatatcgtttttatcaaatccattgttcttctgcgcgcttttattgaaattcagaacaagtgagtaaagttcaaaatgataatacaaatggaacgaaaataaacactttctgtacatatgtacatatgtaaatgcgttgttctcgaagagagattctcagaacacgatttgagccggttcatcttgaaatcgcgatctgtttatctctgtcgattttcagtttgtttattacactccagggtgctgactaagtgtgaagggagagagaatgtttacggaaataaataataaaaaacgcggtaatttagttaagctgcggtagttttaacaggcagcttaacccactcaaatgctaagaaaaatagctatacaacattacacaatcgcaataatcaaatgaggaaaaaaataaaataaaataaagaatattaaaagcgcaatagggattatcaatttttctgccgatttgcataaattgtaaatgtagggagaaaagttactaagttacttaacgtaagttttcattaaacttaaatttaaagtgtagtttatatattaagtatatatgagtaacaaatctcttactcttaaaaaatttaagaaccaaaagtaaaagtgctctaaatgaatgaaacttgattccaatatatgtggtttcgcaatcagaacaattaagtaaaggaacacgcgattgtccttataatataataatcgaaaggatcatttttgaagtatttgcggcatgtgacagctcacagtttgagtgcgacaacggcagctgcatttcgcagtacgatgtctgcaatggcgagaagaactgcccggatggatccgatgagacggcgttgacctgtgtctcccagcggcagcactgcaccaagccctatttccagtgcacctatggagcatgtgtgatcgggacagctgggtgcaatggagtcaatgagtgcgcagatggttccgatgagaccaggttgagatgcggcaacgaggacgatatacggcagcacgaccgacggcttcaaggcaattgcaagtgagtactgaaatgtagaatgtagataacaggatgaggactaggaatggatacattaattgcttctcttcccctttagggaaaatgagttcaaatgcccatccggaatttgcctggacaagagcaactttctgtgcgacggcaaggacgactgtgcggatggaacgggctttgacgagtcggtggaactgtgcggccacatggagtgtccagcgtactccttcaagtgcggaacaggtggctgcatctcggggtcattgtcatgcaatggggaaaacgactgctatgacggatccgatgaggcaccactgctatgcaacaccaccaaaaaggtgaccacacccgtggtgactgagactccgctggagctgctcggatgccccttgccacttggcgacgaaaggcccatcctgacgggtgacggcagccgcgtcctcactggacccatcacccggggaacagtgcgattctcctgcaagcagggatatgtgctggagggagaggagagcagctactgcgccaagaacaagtggagtacttccacaatcccgaaatgcgtgagtgagtgactgtgttttgcccgttccctggtaataatttctcacatgtactccttgcttttccgtagaatactgcagcactgccggagaattcgatggctactccacgaaggccttgtgcacccacaatggacagcaagtggaatgccgcaaaccattccatccgcccggcaccgaagtgaagtttgtctgctccaccggattcaagaccctgagcccactgccagaaatgcggtgcatgaagggaggatactggaaccgcggacgccagcgatgcgagcaggactgcggccagctagccacgcccataaaacagttctcgtccggcggctatacgatcaacaacacggttgtgccctggcatgtgggactgtaagtctgctaactatccatcccgatgatttcattgatattccctgtgtagatatgtgtggcacaacgagaaggactaccactttcagtgcggaggatcgctactcaccccggacctagtcataaccgccgcacattgcgtatacgacgagggtactcgactgccctacagctacgacaccttccgggtgattgcggccaagttctatcgcaattacggagaaactactccggaagaaaagcgacgggatgtgaggctcatagaaatagcaccgtaagtaaaaagaaactggctccttcatgtttcttagcactggtttattacctgcagtggctacaaaggaaggacggaaaactattaccaggatctggcccttctgaccctcgacgagcccttcgagctgagccacgtaatccggcccatttgcgttaccttcgccagctttgcagagaaggagagcgtcacggatgatgtgcagggcaagttcgctggctggaacatcgagaacaagcacgaactccagtttgtgccggccgtgtccaagtcgaattccgtgtgccgtcggaatctgcgggacatccaggcggacaagttctgcatcttcacgcagggcaagtcgctcgcctgccagggtgacag

SEQ ID NO: 42290 - DNA, 1125 bp, DROSOPHILA
cttatattatgaactgcagctctaagcactccaatcgatactgatgaggtgctcttaaaacgtgttttcagattggtatgagattcggcttgaacacattggagctcagttcgctttgtaagctcggtcggagtcgttcttagctcggcggcaagtgctttccagacgactttaatcagcacgcacttgttttaggcatacctatgtgattgccttgtgcacctggatcgagtgcataacagtgcatcagaaataaggattatgcaactaatatcgtttttatcaaatccattgttcttctgcgcgcttttattgaaattcagaacaatatttgcggcatgtgacagctcacagtttgagtgcgacaacggcagctgcatttcgcagtacgatgtctgcaatggcgagaagaactgcccggatggatccgatgagacggcgttgacctgtgtctcccagcggcagcactgcaccaagccctatttccagtgcacctatggagcatgtgtgatcgggacagctgggtgcaatggagtcaatgagtgcgcagatggttccgatgagaccaggttgagatgcggcaacgaggacgatatacggcagcacgaccgacggcttcaaggcaattgcaaggaaaatgagttcaaatgcccatccggaatttgcctggacaagagcaactttctgtgcgacggcaaggacgactgtgcggatggaacgggctttgacgagtcggtggaactgtgcggccacatggagtgtccagcgtactccttcaagtgcggaacaggtggctgcatctcggggtcattgtcatgcaatggggaaaacgactgctatgacggatccgatgaggcaccactgctatgcaacaccaccaaaaaggtgaccacacccgtggtgactgagactccgctggagctgctcggatgccccttgccacttggcgacgaaaggcccatcctgacgggtgacggcagccgcgtcctcactggacccatcacccggggaacagtgcgattctcctgcaagcagggatatgtgctggagggagaggagagcagctactgcgccaagaacaagtggagtacttccacaatcccgaaatgcgtgagtgagtgactg

SEQ ID NO: 42291 - protein, 286 aa, DROSOPHILA
MQLISFLSNPLFFCALLLKFRTIFAACDSSQFECDNGSCISQYDVCNGEKNCPDGSDETALTCVSQRQHCTKPYFQCTYGACVIGTAGCNGVNECADGSDETRLRCGNEDDIRQHDRRLQGNCKENEFKCPSGICLDKSNFLCDGKDDCADGTGFDESVELCGHMECPAYSFKCGTGGCISGSLSCNGENDCYDGSDEAPLLCNTTKKVTTPVVTETPLELLGCPLPLGDERPILTGDGSRVLTGPITRGTVRFSCKQGYVLEGEESSYCAKNKWSTSTIPKCVSE

SEQ ID NO: 42292 - DNA, 6074 bp, DROSOPHILA
tccaatggccgcccctgttgagaagtccgctgcaccaggtgacatgtccgttagcctagagaaccccaaacaattaatccagtccgtcagtgagagcgagagtctgttaggcagcgacacgctgccggagctgcgcctggaagatgaggaggaggatgaggagtccgaggatcgctcctggcgtcgttgatccatcgccctccgctgttgaggcggccgggaaagttccgtggggctcacaagtgttaggaaacccttaacatgtatttgttgttattctatatctaactgctgagtgtgtggcagtgctgagaatgaacgaacactttgcacacttcaattaaacgctctaaatattactaatattttactgaacataagttatgaatcgcctaaaaatacgaatgagtttagctaagcctaagtccgaaataacaacactgaaactacaacttcaacagcgaaatgcaaccaaactccaaggctcgatgcgaaaaagcgcgagacaaaacattggttaaagatcgtgaactacctttgtatttacacatttttcactctatccttttcttatatacaaatatatatacgcggatatataattgttaagattttatgttgagttaaaacgataaaacactaaaagaacaaaaaaattgcaaagaaaaaatccccaaaaacaagcgcaatgaaagtcaaaaaaagaaaaaaatcgtagcaacgtgaatgcaaaacagcaagttatatagagagatataataaataaaatagtttcgtatttcaggagaaacaatgtctatttttggttaaagggtggcagtcataccaacagagaaaaattgctatttgattggtggtgttacttctaaattcaattttttcaaaaggcgcgccactttttatcggtgttaccagctggattgacagctgcgctgccaagaaatcgatgaccgaagaaaaaacttcgataaattcatcgatgttcttcctcttcatatggcgcgatcaaaagtttgtttttactctactgcgaatttatttgaatgaaagctgtcttaacatgttttcgccccgtcgtcgcctcacacagaagatattgcgctaatcccggccaggcaatgaagtacttaaacgtggctgagaagaacgacgccgccaaaacgattgccggcctgctgtcaaatggcgcagcacaaagggtatgctattcaatttggtgggaattgtaggatgcaaacacaacttatttgttttcctgcccacagcgcgaaggctactcggtgtacaacaaggtcttcgatttcgaggcccctgtgcgcggtcagaatgccaaaatggttatgacctccgtatccggccacatgatgcagctggcattccaggtgtcttacaaaaattggagaacggtggatccgcgctctttattcgacgcgccggtgaaaaagggcgtgggctcggattatgagcctatcaaaaggaccttggaacgcgaggtgcgcggctgtcagggattgattatctggacggattgcgatcgcgagggcgagaacattggctacgagattattgatgtgtgtcgcgctatcaaaccgaatatttcggtttatcgtgccactttctcggagattaccacggtggcggtgcgtcgggctctgcagcaattggggcagccggacaaaaggcagagcgatgcagtggatgtgcgcacggaactggatttgcgaactggtgccgccatcacccggtttcagacaatgcgcctacaacgtctgttccccgaaaagatagctgataagctcatatcctatggaagctgccaaattcccaccctgggattcgtcgccgaacggtacaaggagattgaggccttcgtatccgagccattttggaagattaagggtaggaggaggatgcagtacgcattggaaagctataaatattgtatttctagttctgcacacaattgatgacttgacggtggagtttaattgggcccgaaaccgactcttcgataaggaagcttgtgaaaactatttgctcctctgcctggccgaacccgatcctagagcgctcgtggagagcgtcaccgttaagcccaaacacaaatggcgcccaactccgctggataccgtggaaatggagaagcttggctcgaggaaactcaagctatctgccaaggagacgatgacaatagccgaaaaattatataccaagggtttcatcagctatccccgtacggaaaccaaccagttctccaaggagttcgctctggcaccactagttgagatgcaaacgggtcaccgcgactggggagcatttgcccagcgggtgattgagtggggaccaaatcctcgaaacggtaacaaatcggatcaggcccatcctccaattcatcccaccaagctggcagaaagtaagggaatctttattttaatctaaaaccgaacataacatacccctttctcctaaagacctgcagggaaacgaggcgcgagtgtacgaactggtcgtccggcacttcctcgcctgcgtcagcaaagatgcagtcggctccgaaacccttgtccatatcgacattgccggtgagaagttcacggccaatggtctggttattcacgaacgaaactacctagatgtttatgtttatgacaagtggagtgccaagcagatccatcactatgaaaacgggcagcgttttgagcccacggaagtgtcgctccacgaaggtgccaccactgccccgcccctgctgaccgaagcggatttgattgcactgatggaaaagcatgggattggtacagatgccacgcacgctgagcacataaacacgatcaaggaacgcggatacatcggagtgctggataagggctttttggtacctggagttattggaatgggactgtatgagggatacgatgccatggagctggcccttgccaagccacaacttcgtgctgagtttgaattggatctgaaactaatttgccaggggcagaaagatcccaaggtggtcctgaccgaacagatagccaagtacaagcaggcctatcagcagattaccgataagattaccgccatggacgccaagatatcggctcgcattaatgagacaccagctgccaattctgcggtgcaggaaggagctgatggaagtgctccaagtcacggcatcatccaatcgatcttccagtgccctaagtgcaatgaggctcctctggccctaaagccaaagaagaaccagcagggctggtacattggctgcaataactttcccgactgcaaaaacgcagtttggcttccaacggagtgcaaggacgcatctgtgctggacgagtgctgtcccacctgtggcgatggataccggatgctcaagttccgcctgagcacgccttactatcgcggggtatttggtactcccagcggttggtacaaaacctgcttgccctgcgataatctctttcgcaccacgttcaacattaatttggactcggttaagaaagtgggaggcattgtgggtgaagtgcgtggtggaggagggggtccaggcccaggacccggtggcggtggctctggcagaggagccggctctggtggatggagcagcggacctggaggcggtggctctggcggaggcggcggctctggaggatggggcagcggaactggaggcggtggctctggaggatggggcagcggaactggaggcggtggcttgggcggaggaaagggcaagaaacctggcggcgaatctaaaaaatcagctacaaaaaaacctccgaacgaacccaaaccgaaaaagacgaaagaaccgaaagcggcacccaacaaaaagactagcagcaaatcgtctggcagcatacggagcttctttacaagtgcggcgcctacaaattccgccagcaatggactagatgagtttttcgatagtaacgatggctttgaggacgccatgttggctgctgccgaatccgtggaatcgagtagccaacccaaaaccattagtatggtccctcttgatgacgacatagccgccgcttttgcagcggatgatgatgctgaattcgaggcgttggtaaacggcggaaccatgcccaccgaatccaatggggaccagcagctggacaaaagtctctcggaatggataaaggagcaggacaaagcggacgagaggcccatgctttggggaactcgggagcgagcgtcgttaggtactgctgctcccactcctcctccgaaaccggcagctaaacgaccgagatgggacagtgtcgaacgggattccacaccaccctcttcggttccggaatccgaaacagtgctgtgtaccggatgtcagcagccagctcgccagaacactgtccgtaagaatggacccaacctaggcaggctgtactacaagtgtcccaaaccggatgagtgcaacttctttcagtgggctgatgagccaccgtcgtcggccaaaagcaagaattccaccggcagtgcaccacaaagcacaacatcctggggctccaatcgagtggttaccctgcctagcattcagcagagcaactcacagcgtggccaatcatctatgcgatcaaactccagcagtactgtcaccattactcaaacgaaaaccaaacagcaggagaggaatacagcgactccaggcgacggagaggaggtgatgtgcaactgtgggcagttggctagccagctgacggtccgaaaagacggaccaaaccagggtagacccttttatgcctgtcccacgcgggagaagtcatgcggtttcttcaaatggggagatgaggaccaaaaccaaggtgctagcagcacctcttggggctcggctaatcgaaatccccctggacgcagtcagcccacagctattacgtccgatggtcccaaaacgagacgctgtggtctctgtcgcaaggagggacacacaaggaacaagtgtccacgcaaggatgagtttgatatgtagtcaagcgacgtggatattgccacagaacggatgtgggaagatgtatttgtatgtacattgtataaagtgaaaataaaaaagttgtttttatgaaataaaaccaattattaactatggaatattaactaatttcataattgaaacacagctaggaaaacacttgcttctagattttataaatattaaacatttattggagcgagcttcatttattgcgcagattagagggattaggaccagttctgagtcccctctcaacacataaacacttatagcgaggattggaatggtaaatggttagagttatttaaacttatatacaaagttcataacgtcagtagggagcacatcaaaaatcaaagatgctcgtaaacgggcttagagataataaagttgggcaatctcgatgaaatgtcattccttgtggttatatatatttatatataaacatatactctcctaatcctattttggataaacgcttttacattgcattttcgttttgggtatacaataaatattgaataggtttatttattggaagaagtaaaattcgaaaacactcacacttactgtaattaatcttttgtccgaagtaaaattggtttaaaaaatatataaataatggtaataaataattggttaactaaattactaaacagtttgagattcattggattgatagcgagtccgtaggaaataccattaagtacagtacgtttgcttaaattaaagataacatttgcgatattgagcctaaaatgggcagtacgatattgggattgtagattttcgaatggtataggtacagttcaacaggtatggaagtacatttccagttcccctcattgcccaagatcaggcttccggttatgacttcaagaaggtttttatatcgattggaatgatagtggtttcaaatgattccacatttagatttcgacttcaggcgtgaactggcgtcagaagtagatctcctcttcctcgggcttggctcgaggagctgtgccagtggccacagcgattcctgccgttcttgcaattcctgtccggctgctcgttggagtgcgagtgtagtgggccaccgattctgctcgagcta

SEQ ID NO: 42293 - DNA, 3848 bp, DROSOPHILA
cgcgatcaaaagtttgtttttactctactgcgaatttatttgaatgaaagctgtcttaacatgttttcgccccgtcgtcgcctcacacagaagatattgcgctaatcccggccaggcaatgaagtacttaaacgtggctgagaagaacgacgccgccaaaacgattgccggcctgctgtcaaatggcgcagcacaaaggcgcgaaggctactcggtgtacaacaaggtcttcgatttcgaggcccctgtgcgcgctggcattccaggtgtcttacaaaaattggagaacggtggatccgcgctctttattcgacgcgccggtgaaaaagggcgtgggctcggattatgagcctatcaaaaggaccttggaacgcgaggtgcgcggctgtcagggattgattatctggacggattgcgatcgcgagggcgagaacattggctacgagattattgatgtgtgtcgcgctatcaaaccgaatatttcggtttatcgtgccactttctcggagattaccacggtggcggtgcgtcgggctctgcagcaattggggcagccggacaaaaggcagagcgatgcagtggatgtgcgcacggaactggatttgcgaactggtgccgccatcacccggtttcagacaatgcgcctacaacgtctgttccccgaaaagatagctgataagctcatatcctatggaagctgccaaattcccaccctgggattcgtcgccgaacggtacaaggagattgaggccttcgtatccgagccattttggaagattaaggttctgcacacaattgatgacttgacggtggagtttaattgggcccgaaaccgactcttcgataaggaagcttgtgaaaactatttgctcctctgcctggccgaacccgatcctagagcgctcgtggagagcgtcaccgttaagcccaaacacaaatggcgcccaactccgctggataccgtggaaatggagaagcttggctcgaggaaactcaagctatctgccaaggagacgatgacaatagccgaaaaattatataccaagggtttcatcagctatccccgtacggaaaccaaccagttctccaaggagttcgctctggcaccactagttgagatgcaaacgggtcaccgcgactggggagcatttgcccagcgggtgattgagtggggaccaaatcctcgaaacggtaacaaatcggatcaggcccatcctccaattcatcccaccaagctggcagaaaacctgcagggaaacgaggcgcgagtgtacgaactggtcgtccggcacttcctcgcctgcgtcagcaaagatgcagtcggctccgaaacccttgtccatatcgacattgccggtgagaagttcacggccaatggtctggttattcacgaacgaaactacctagatgtttatgtttatgacaagtggagtgccaagcagatccatcactatgaaaacgggcagcgttttgagcccacggaagtgtcgctccacgaaggtgccaccactgccccgcccctgctgaccgaagcggatttgattgcactgatggaaaagcatgggattggtacagatgccacgcacgctgagcacataaacacgatcaaggaacgcggatacatcggagtgctggataagggctttttggtacctggagttattggaatgggactgtatgagggatacgatgccatggagctggcccttgccaagccacaacttcgtgctgagtttgaattggatctgaaactaatttgccaggggcagaaagatcccaaggtggtcctgaccgaacagatagccaagtacaagcaggcctatcagcagattaccgataagattaccgccatggacgccaagatatcggctcgcattaatgagacaccagctgccaattctgcggtgcaggaaggagctgatggaagtgctccaagtcacggcatcatccaatcgatcttccagtgccctaagtgcaatgaggctcctctggccctaaagccaaagaagaaccagcagggctggtacattggctgcaataactttcccgactgcaaaaacgcagtttggcttccaacggagtgcaaggacgcatctgtgctggacgagtgctgtcccacctgtggcgatggataccggatgctcaagttccgcctgagcacgccttactatcgcggggtatttggtactcccagcggttggtacaaaacctgcttgccctgcgataatctctttcgcaccacgttcaacattaatttggactcggttaagaaagtgggaggcattgtgggtgaagtgcgtggtggaggagggggtccaggcccaggacccggtggcggtggctctggcagaggagccggctctggtggatggagcagcggacctggaggcggtggctctggcggaggcggcggctctggaggatggggcagcggaactggaggcggtggctctggaggatggggcagcggaactggaggcggtggcttgggcggaggaaagggcaagaaacctggcggcgaatctaaaaaatcagctacaaaaaaacctccgaacgaacccaaaccgaaaaagacgaaagaaccgaaagcggcacccaacaaaaagactagcagcaaatcgtctggcagcatacggagcttctttacaagtgcggcgcctacaaattccgccagcaatggactagatgagtttttcgatagtaacgatggctttgaggacgccatgttggctgctgccgaatccgtggaatcgagtagccaacccaaaaccattagtatggtccctcttgatgacgacatagccgccgcttttgcagcggatgatgatgctgaattcgaggcgttggtaaacggcggaaccatgcccaccgaatccaatggggaccagcagctggacaaaagtctctcggaatggataaaggagcaggacaaagcggacgagaggcccatgctttggggaactcgggagcgagcgtcgttaggtactgctgctcccactcctcctccgaaaccggcagctaaacgaccgagatgggacagtgtcgaacgggattccacaccaccctcttcggttccggaatccgaaacagtgctgtgtaccggatgtcagcagccagctcgccagaacactgtccgtaagaatggacccaacctaggcaggctgtactacaagtgtcccaaaccggatgagtgcaacttctttcagtgggctgatgagccaccgtcgtcggccaaaagcaagaattccaccggcagtgcaccacaaagcacaacatcctggggctccaatcgagtggttaccctgcctagcattcagcagagcaactcacagcgtggccaatcatctatgcgatcaaactccagcagtactgtcaccattactcaaacgaaaaccaaacagcaggagaggaatacagcgactccaggcgacggagaggaggtgatgtgcaactgtgggcagttggctagccagctgacggtccgaaaagacggaccaaaccagggtagacccttttatgcctgtcccacgcgggagaagtcatgcggtttcttcaaatggggagatgaggaccaaaaccaaggtgctagcagcacctcttggggctcggctaatcgaaatccccctggacgcagtcagcccacagctattacgtccgatggtcccaaaacgagacgctgtggtctctgtcgcaaggagggacacacaaggaacaagtgtccacgcaaggatgagtttgatatgtagtcaagcgacgtggatattgccacagaacggatgtgggaagatgtatttgtatgtacattgtataaagtgaaaataaaaaagttgtttttatgaaataaaacc

SEQ ID NO: 42294 - protein, 76 aa, DROSOPHILA
MKYLNVAEKNDAAKTIAGLLSNGAAQRREGYSVYNKVFDFEAPVRAGIPGVLQKLENGGSALFIRRAGEKGRGLGL

SEQ ID NO: 42295 - DNA, 17391 bp, DROSOPHILA
atccacttggatcctgcatgagatgagattagtaaaatttggcgtatagaccacagtacagtaccctgtaatgtcagcagtccgtatcccatagaaagtgcgagagcattagttgtctgagaacttctgttgatgcagaagggtgacgtgaggactttttcggcaatctttggatctcgtgttatcacaattggagttgtgcctatccaggccatgtatgtggagccgtgcttatccatgtacgtggttcttgaactcattctgcctgatgatacggatatttttttttttggctaattcgagtttttaagccgcacttacccctgctaattataagatatcttacggaatttccaagtaaagggagtcccattcttcccggcaactgcatcatcaacatgtataatttgcgtcgactccatagaaaacggatccaaagaattaaactggcagcgatcaacaattgtatgactatcattttaatcaagtattgctcatctgagctgggaagaataaatatatattttaggaggctacattaatttgacgagttcgggttaagctcttttctaatagcattaccctaatgtcaacctattaatggctttgaactctacttcttaattactttgtacaatatttttgtgcaattccattccagctataatttattaggagggtccgcatataaattaagaaatacattttccaaatttgggatttacattttatttttataaattattaagtcataacgttattgtttaagataaatcttagtaacagcaatgtagtcccatcgagaaatatcctaaaatgaaagtctaggaaattctgataaaaatacgtaagttcttttaagttcgccgatgaaattctagtccaggtgactgagctagttccattccaatgttgtcaacgaactcgagatcttcgtatcgaaaagatgtgcttactttgcagtttctaagtatcttagacaaagcaagctttgatgacatcaacccatatttccaaccttaaagtataataattaatagaagtgccttttatgatggcaaacaaacccacctatacaattccgccttcccttcgaaaatggaatgtatgcgtaaggatgcctatcgcgcacattgtcgggcagaaagtgatctgggttgaacgacgatggatcggtaccccagtgatcccggttgcgatgggtagcaaatatatcgataccaataccaactccttttggaatgaccactccagaggatagacggaaatcccgtattgtttccctcggtgtgaatggaacagatggtatcaaacgcagggtttcgtttaccacgcgctccaaaaaaaccatcctttgcaaatcgtcgtaggtcacctcaaagtcaccggccacgggaaacagctctttgagctcctgatagaccgtgtcctggtgctccgggaacatggccagcaggatgagtgcgtgatacaccgtgtcaccagttgtctcaaaggcagcgacaacgaaggaacagcactccgattgcacctcttcccgggacatttctccattccgatggagttcgatggccttattaatgacagaggtaatttcaggctgtgagccactttctggctttgtcattaactttttgtcaacaatctaaagggcgaatggtcttaggcaagtgatgcaattaagccaagcaaaactcaccgtgcctatcattttgttaacattggacttggccaaagctttctgcgtttcaaatccgcccagtgttgaaaatatcttgttgtgagtgaatggcaacaaaacattcataacaattattttcataaacctaaaagtacaagaagctttggatattgttactacacttttgcgcaattggtaacacttacgtctcgtaacttttcaaaactgaatcgttcttgaaggacgcatccttctttacatcagttcccactgtggtttctgtggaaaaatgatacaatattgcagtagacatcacatcccattttagcgcagacttcacttacgagtggctattctaaaagaccatctcactatgtcgtcgcggacctttttttcaccctgaccgacaagtgagtccaggaaggcaactaaagttttcgcctcagaattgaagatgggaagaaaactcagcaaaacattttgcttgaatgccggatttaagttcttgcgacgatcaacccatttagatgctaacataaatgaaatatgttattaatgtgtaagttaaagcctagttttcattaccctctaatgataataatccatctcctgtacagctattaaccggcttggaaaatatcgagctcctatttaggcactctggggacaaaaagatttcctcggcaatctttggatcccgagtgattacaaatggcgtcggtcccacccacaccaaacatgtggagccgtaaatatccatatacttggttcgtatgctcattttacctaaagtgttcacaaagtgttcaattaatccactgcctttctatgaagtgtattcaaaattcacgtttataggttatcagatactcaaaggctatgcccagaattggtaatcccattggtcctggtatcttaaagtgcatcatatagagccggcgacgactccataggaagtatatccagaaacacactcccacggctaaaagcagttgaaacgtatccatggtaaggactctaatccgaacacgaagtaaacaaacaccttggagtggttctaaacactgttttgcctcagcgaattcggcaaaggttttatacgaaagtggaagtgattctgtggttaaattaataataataggtatgacggtgtgctttattactagggtgtaagctgaccttgaactaaccaaaacaacgttcgactttgtcctctttttaggcgtttaaaaaaagtctctgattaggtcagaaaccagacgtctaaaggcaactcaaacattttgcggtcggcgtacttccgcactttaagaggcccaatgatctcctcaatcgccctacgatccatcatccccactgggtgtaaaagcaattaagcccgaatcgcgtcaaccgcttacgagtctaaggcgaagcttacctggctatataactaatctgtagacaaagccaaatttaaaagaaaaaaacctatagacaagaagctgctgggccacaacaggtaaatcactatcgaagtgtgcgcggggcaattaaagtcacgaaaaatgtcagcggcgataaattattttttaagtgcgttcccccaaaaagttgtcaaaaagtgttagaaattttcaccgcaagctgggaggcaatgtcgatgcgtgatgccttggtgtcccaaggtgccggtgccacaaggtgtggcatgctgcccacgaacatggacacggcacacgcaagctccacagatatttgggtgacttgtggttacccagacgcattgggtctttggaaagacgtctgatagccgcgcgataagtaacattaccgtacaattttcaattaacacgcaggggaaaattcgagggggaaatgcggtgataaattccacagagcctcgaccctggcgcttgcaggcacaaactgttcgccggagcaccaacaaattgtctaatctaatgcccagcctggagcccagaggagcgtagtggagctgaacatggagctacagcccggaggaggacgaaatcgtcgttgtgctccagccaggtcggaactgatctatggtagccgttagtgtcgtcggcagtgaaaagttgtcgacctgcactggcaaaatatagtaaatagcgaatgcaaaaaataaaaggcaggcaaatcccggcaaataatcgacaaacgtccaacaagccaactgagcgtggtagacgatttatcatctcgacttgggcttcagtttcgcctccagtccggtggccgtaaaagcttctttatggctgcttctgtgctctggaccctggacattggttctaccttttggacgggatggaaatcccgctcgccgggcacaaatcttagattttatgtttagcttcactatgcccgctcgcagtgacattttcgcttcgttttttactgctgttttatggatctttaaatgaattatatgcatgacacatttaataatatagttattatttggaaaataaataattctattatagaacataaaacttataagaacaattgcagtgtaaatgagcttatgttttattatagttttatgtataaactaggtcgtaatatgggttttatataatatttcgtcttcgaagaccgtaataacttgtatatattatttatatcggctttcataggggaaataattgtatatgtacgcgtacagtggttattactaccattttttttttatatttcttgggtcaaagctcacgattaaagagtataagattactttcaatgcactttcgactcgcatcttcgaacttaatcaacttttcaattttgcttgagcaaacaaacgaaacgcaaaaagtgtcttgccatttttcctattagatgcggcgctttcaacattttcaggaggcgcgtgaggagttcaaaggctgcccaaatgacatccgtatgtggccagtggctggccaaaataacgccgcttctccattggcgcatctccactggtgcagtggctactgcacagctgcaactgcaactgcagccccaagatcgagatggagatgcatctggtgaggagcacacacgtccgctggccatgaactttgctcgcctaaccccttcctgccattgaatgctgaatttcggattgtacctccggcaatttgagcacctggcgggctccatgtgagcgcatccagagctcattttccgttttccccagcgccgcgaatcgaagtccatttgcgtaaattgaaaatgaagcggaaaaaggattcaaacacctgcaaaaattataacatcggaacgactacttaactaatggcggggaattactcgaaatttaagccatgtatggtaagcccactcacatgaattcctgcctgcagatggattgtgtgggtgtgtgaaatagggctaagctctaaggctttgaggtgatgcgtgcgggttcaggcctcaacttccgagatccccgcccacctggcgacgtggacatggacatgcatgcgattccattttgataataatggcacagccaaataattataatgatcgtgatcacaatcagcgatgggagatgactaagcaatttaccgtttctaagccgggtatagatttctggggccagaccccgggcacatcttcaatgaaatttcaggtcaattgtcttgcggcggctgcgtttggctgtttggctatttgtgtcttgcggtctgggatccgaactccaaaccccagcccaaacccaatcctaaactcgaaccccaacccaaacctgggacccagaaccagaaccagacttggaccgcagccagttcttggccagttcaattggattttcttttttgtttttcgcattttcgtgcttgcggattctccgacatctaaacatcgatcccctgcccccccggaacatcttctccagatatttcagaagacctggctgcgtaggcgctttcacagattaattgaagtcataagcaattgtaaacttatcgcttctcggtccgccgaaccgatccatccaccaactggataattctataatattttctctgcggtttctccatcgcatcgcatcgggcaaaagaaggcctttatcgatttgcagtttgagaatggctggtggtgttggcgtttggttaatttgttgctatatttgattgtggcacactttgcgcaattatttgattgcgtttctattaagtcccgatacagttcaagaggtcaacaatcagaagccactccattggctgcgttcatttcgctgggtttcggggttaagttcttttcatcatgttttaaacgttgtgaaaaaatttagaaccattgaaaattaaatataaaatatgaatatgatgattcttctttttactgcaccaaaaatttattattgaactacaaatagaagtgagcatttgctattggaaaaggtatcaattgctatcaactggagttagccccggctcgatttcataaatctgctacttgccagctattacctataagccccgtcatccagagcaacaatggcagtaataaagtttggcaagtgtgtggcgatgcagcccatccgtgacaatggaggaagcgccagaggcagcaattacggagcgcgtcgggacgaaaggataaaagccggatgctcgaatatgggtaataaatgcggcacggcaagatgatacacttatccgccgccacacgcagccacatgatgagttaagaggcaaatgctaatggaaatatgacaaggaagccgcgctatatccttcaggcaggcacatatgcaaatggcatgctaaatgtacatatgagaaggatgtgcgccatgtgaatttagtggttacggaagctgtgcggcagttaaacatggcgtctggcgattttattgccgcctcgaaagtttgcctacgctttgtggcataaatgagtccacaaggaagtggcagatacggcagggagccagggcgaattgaaattcatggagcaaaaccccaatctcggagctcggagcgtgcccgaagcgttaatctgaatcagagtacatatgggcctagatggttatggccaaaaggaaaccccccaccgaatgtctaacatatgtttacttgttgttgttcactcgtgttgtgtggcagctaaattgcaggcaaacaattaaaatgtttatgcgactcaaattgaaaattaattgctggtttttcggctcctccttctgcggttttaattaatttttttgtttgcccaaattacgcacatatgcaaattatggaaatcttgcggagtcagtctcttcaagtgcagctgtagatttgcctcagttggagagaaatcattagtagattgataaatggactttcgccgcaaatttgacaaatttgccaatcaaacagaatgctgtctttcacttggactttctctctctctccttctgtcgttcgacagttgaaaggtgtttttaattactccgagtagttgacaaaggaacaattaaggttcaactgggacagctcaggacagcatttagccaaatggaaaagtgcaaatattgtcagagccttcaggacgaatcctcgcaggcagaagggtgagtgtgagagagtgaatgtaacccacacaggaccagaacatcattagtgcccccacggcaaatggcagggggatggaaatgaacgacttttcgtccttcaaagacgaactcgaagatgaaggcgctcttgctcgtggtatttgagaaaattgacatttctggcaaacggctggcgcaatgcaaacagcaccgaacagaacagaacatccccggccaggggaagcgagattttctaaaactaaaataatttgctaatatttgcacagcaacggcgcaaagttgagacacagtgcgccacatcattaattatttcagtcacaagctgcgagttttcttggctgtggatgaagcttgaatcggactgccaacggattgccttcaaaaggttgttaattaataggcattttcgctgaggaatttcacaattctacatttttgactgcccgccgatttatatattagtttaacgggaatgccaaacgataccagttcctattgattgatgaaaaaagaggctatcgaaattggccaataagaatggtatgcaaatggtgcagcacaaagtaaaaaatactcttaaacagcaattaatttgtttagcaattaagaattaataaaatattaaattatatttatttattgtgatatttatgaaagctaaaaaatatttatgattttatgaaccactcaatttcattttcagtaaatttgccataaattctccattctgattgtttccataaagtaagctaacattctgtttactaacagccgttgctcctgttagataagccaactggaaaactacccactgaaattgaaatgagacggttcggaataagaagcattcttaacgaaactcgattccactcaaagcaaactcactcaacggctggccacgccccctttgagaaactgtatgtgtttgtggatttccgagagcggagcagagctcttttttatttgttaatcaaatactgggctccccgaactcccccctccaatttgccaccgctcgagcgagatggaagataatgtttccgtgagtggaggggattgaaattggaaaatttgtaaaggaaagcggcgaaacaagagaatttcccagttggcggccacaaagacagcagtaaagtggagcgcacgcggcaaccaaaaagcatcgatggcatctcacggatacggctgaattttccacatttaaacgctcttctcgaatatatagtgcggcttatctggccgatttcttggtcgcttatcactgtttggattgttaattttttagtgctgcccgattcagtttggtttgctacaaaatttattattttccgggaatccttatcagcggagcgtaaaaatattgactataaaatatagttgagaacatatatagaatgtgacctaatcgagaatgagattattgcgagcagaggcagatttcgatttgaaaactattcagatcctattatttttagattgcccccaaaaacctctaatcgtcgcaattaataaatgactgttttgccaataaacagagaaaacctctcacccttattaccctttagacacacaagatccttgaactcgaacagcaaagatgctgcctcatcaaaagatgcttagttccccttttttcgtcaacgatttttgggtgcaaaaatacccgaaaaaaattaatttcttttaaagagttcatcaaaggcaggccaaatcgaaaggagagggtaaaaaatgggtaaagggatgatgcttaggaggggttcatagggcgatcatcgcaagatcaaagatgctcggccttttagcgctgactcctttgaaaggagcaaaatcaagaagcgtgttcacttctctacattttttagggtaaaatgttgaactttcttttattaattactagtgacatggggcggggttcagaggtgacaagctgttttggtccagttaaacaactgaacttctggtgtctgatggacatttgaccgttagaactggaccaaaacgcagctttccctgggaaacttaagattctaagctatttacaggaaaattctgggcaatcttattcgcatgatttacgataaaattccaaagaaatattacaagacttttttatttgtttggtggaaaactagctctgtaaactgccatggcaatagtaaaaccgacattttcgccaaataacaggcagaacataaaaatcgaattagtcccggcgacacatcaaattgaaaattataattaatgatgctggccgcgtaacagtaactgtaactatggcattttcgccatttcgttttccggacacggaaaaaatgggtgaaaaaagcggcgcattgaattcaaaaatcaaacggaaattaacgcagaattcattgaaaatgtgcgaaaaataattgtcaagcgtaacgtggtgaggggaggcactttcgagagggggaaaaatgcaaggggaggtagcgcggtttttgcatatgcgttttcatggaaaatcacaccccggtgaaaatcccttgggccgagagtagggtgcatgtgtgtgcgtgtgcagtaacctttgacccagtttcttgggcactgcaaatatttttgcttaccttttgcatatgcatgagacgccgtcttgattcctttgaaaattgaacaacagtattgaaagcaagcaaatttgttttctttcgcgtagggaaaaaagaaaagccgcgtggcatcacttttttgttctcagtcaggagttgactttattatattcataaatatttattgacagctcagaacggaatgccgcgaatacaataggctcttttggatttgttttgttcgacttggcagcccaaggagattttcgccaaattttcattaagattacgctacatttttggcacctttaagggcttctgaggcacaaaagtgaaagaatagggaaaatggtattgagaattgattgaattccgatagcaaaaaccgggaattcgatggagaagtcccgccaaaaactcttgagacttcaatgacctcaaatgtacgttactttcgtttaagaagatccaaaatctgaacaataaagctgcaaaaaatttattacacgttaataaagtcttaaagtccaaactaattgaaggtttcccaatcgtggaatcctttgtacgcattccatttgataagcatcataaaaatatactgctccaggatcttcctccctctcgaactccctcgatctgcagctaattgaatccgggcaagtatctgatggtgggacatctgcctcgaatgcggaacaaacgactatctcaagtccctgaagatatgccaatgacgatacgattgtcatggccgtaaatgctgtcacacataatatgctgtccggcagcgcaatttgcgatttcagttttatggatttctaatgaaaaaccacatcagcgagcgctatttcttgggacacacctggacaaatagtgaagcaacccttcggtgtggacgagatgaccccgatgacccagcaacgtcttttgcatttgcatacatcagcattttcgagggcttttatttcgttttttgggtgcatgatttgtataattttcctcaaaagaaaaactagattttttgggataaatcgagggaatttttaatgaaatttccactattctcaggggttttcgaaaaaggacaagcagtcgtgttaagtgaaccatttgatttttattcttccccctgctctacaccatttaattaatactacaataccattttgcgaattctgatccttggaaaacgtcatcattttgttgtgattgacacttcgctggcacttcaatcaaaattccattattatttcgtgtgtgttttttaattgtgtttgacaaagttgcgaaacaagatgttaaccccgggggttgactccagaatgaaggcagggatgcagcagcatcttgagaaaagatcagcagctgcccttgtcgcagtgagatcaccgaaaactgacatttgaccattggtcaaagggttgaccagctcaaagttcgcagcagaattatgggaaagggttagacctgatgatgcactgggggatgctggaaactgtatgaatttagcttgattttcccgctcccactaaattgaagcctaatcaaaacatctagcgaaaagtatcaaatatcgtccaactctttccgccgtttcaatcgagctgagcaatcgcagggcattttttaattgcctctggcgggataaaatcatctcaaattgggttataaaattacaattgcggttgccgaacaagagggcgcaaaaaatgggtttactaatgcttgcggttttgatttcaaaggatgctcgctgagggatgccccgaagtcagcgaaattgatacagatcctgggcaggatctcctcctgccaaggggttgcaactgtggcaacgagttgaattcgagtcgcgacaattgcgtatactcgctgtttgtttctttctttttctatattagccccgagtatcgcattacgcagctgattgcaatctgttaacccgtatttgtcagcctccgggcaatcgaactcaaagtcggcgaaaagggggaagtgccgcgtgcctttctaggccgcagttcaggtattatctaattaccgcattagccgcatcaggatcgacttctaggcggacagacatctgccgtgggtgttgaccgaataggaaatagtttaaaacccggccagtgatgatgtctttgtctcgtccagaaggtgtcgcccattgttgtgcaaggtgacacacctacccgagagccattgtcttccagttgctcgtttcttgccttttcggtgatttacgggctggcgaaaggaaaggacctgaggcgggagttgctgcggatgcggacacctcctacgcaggtccagtgtttgtccggctaccaaaataattgaccatatttatggacattttagccttttatgtcttcatgtcggcacacttccctttggtcattctgggctcattcattggtttcccattcgcatgagggaatacaactattttagtctagtttttgcactcttgcctcccgtgccgcgtgctaaatgtctaagcaattgttttacgccgtgtttttgtggcatccgaacttccttccgtaagcaatttcatgctcattttgagggcgttctaactgggcctattgttctcatgctggccagatggccagagtgtgagaattgggcacaaaaaggtgttaattgggggggtccaaagatttacgatggtactatcaactattcggtactattttacataaatatttacatgagccgaacctttgccaccacccataaccctgcccccggtccaagatcaccagacagcttgacccctttcagttccttgggtacagagcttttatgaaatcgtttgacaaaaacacgagaagaaactctgctttcgcaagcagtcgtattaaaatgtcagccccccggtggcaaatgtcaatacaagggggtccagttcccccagttccgtcaattattttattatgattctcctctgtagttttgtttttgtttcgggtttccccccccccccacagctccacttacttgggttaccctgctgctcatttgtttgtcatttgccgacttcgaactgtcggctaattgtggctgctttttgcttttcgcttaatgcattttgattttgcaactgcaaaacagaagcagaggcagaagttcgtgatctgtggcaatcgcttgacatttacaaggcggcggacttttgtttttaattagacgactcggagtcgtattcggcatcgcaatcggagtaggagtagaagtcaaactctggctgggtggtctctgctccgtggctgattatcgacgcgagtacttagatctttgccgtcgattaagctgcttaatgccattaacatgattaagagccagccagcagccccattttatgtggccactccgcatgatgtctccacataggaaatcccattgactgggatcaattatgagcgatcccatccattcccagcttccagtccaggagttccgatcggagctaattgagcaattgaactctgatcgcggactgtgaacgattgtgtctttaattcataatcaaatgatacaaaacggaactgccagggggcactaatctccttgcttacggccaagtagcggtcagatgtgatctatcccgtttggcgggctctgttttaggggtgagtgctttctggttcgtccgtgtcaaaggtcaaaatggacgaaaacttctcatgggtcagttcggtgctttaaaataaatcaggaaccaactcgatttcggacacggaaaaacgggttttactaccaatttctgttccgtttttagaaaatacttctcgagcttgacctttgaacttagcccaaaaatccaaaacgggccaataattccagtccatcctagaataaaccgagtgcatgggtatgcggcctgtgggaaatgttctcgaatttagccagctgcttgccgcatttcagaaagaaaaaaaaacttttatcaaaaagaacgcgcagataacggcgggcaaacagaacgaatttgcccgaaacttatttacacttagcggcaacatttgtttggcattccgaatatctcatagatagtgcaagatccgtgggatgccattcggattgcagcagacgcccggcggaatctaattttatgaatgaaccaactgaatccgagggccgaaggaagtgcgagtatgcgtaatgcagtaacaagtcaacaaggcaactaaacttaaactaatgaatagaatggctctcggcaccgtctataaacatagtttatctggcggcaaacatttgccatgataatagtgatgaatacattgcatctgggtcgggtcgtactcgagatagttcttctgcaggtgagcggaccgtgtgggaattacagaaccttcgccggtagcccagatctctgggtctctaaaggtgggcagagcggaagtccaagtcgtgataagagtggttccgatgtggaaacatctggggcttcgctttgaatatcccacctccacgccctatgctaattccattcgacacatccgggatcacttatgttccctgatatactatagtctttcagctcagccggttaattagcttttagcgagtgagtgaccacttgggccgatctgcgacagaaacagaagctcgattgcaccggaaccctgacacccaacacgcgggtatatggcccctttttgccgttctgcaactaaattgccgaaacccaataattcacacattcgccgctgactttgattgctccttgtggtttccaatttccaggagggatcgaacgttcgctcgacagaagggttgagggtaagggttgttcgcctgcccaataatatttaataacaattgatataaatattgaaagtattattgagtcataatatagactccttcgccctttggttagtcgtgaaatttgactcgcttgtggcatttctgatcccatgtaatctcgtctagcttatcttggaccccagttcgtctaataaattacatttgaactgctcaattttcagagctattctattcggcgataaaggcttatcgcaatgagaaaattataactagagaagatagtccagcttcgaatttcagatcacagctcgtggaaatcgtaaataagtcagcaaggaagggatttttaaagctggttgaagtctgactgcctgcatttcccccacgtccaattaaaatagcctagcttctccgcaatctcatttaaatatccctacatcctgtatcgtttctcacggaaatctttcagaatttgttccattttttcctggtcgttttttctcgactccactgcagtgtaacaaattccaatgggtttcagaaatgcacgttgtcgccccaacttatggttaaatatttggaaaatcagccgcagtcataaattgtaatcttcaacgggcgagttgccgttgaggatcctggcgcagtggatgtcacttaagggtatgttattgtttttttaatacttgtccagatgttgctataaggttgcagttcattccgacgtcgcaaccgatggagtcccatgtgtcaatgatttttcccttatttaaatgctgtccctgttcggttttttctcacactatagttgtcgtttagctaatttgtgatttttggtgttttcggtgttggatttgttttacgcttgcctaggaaaactattttccggctattgatttccatcgagtggttgaatgacatagaagtgctgggatgatttattgacatgtttaccgttccaaagggggaatgattactcttggagtttgcagtgtagccagtttgtccctgggaaaatactcctatacacctgtttattcagtgaacgtcctggggatatcctgtccaacctgtgcgcacatcctgcatccgtatttgcctgaggacatccaccaggaaatcggactgctccaagatcacgtatgtaagtattctagaaaatattatttacctaccgctctcacactggcttaggaagaatattgaggaaatcctgatagccggctttcccaaggatattcaactacacgacaacaaagcggaaaatccgaattctccacagtaatccccccattcccccgtgtgttttcagagcgcctgcgcacaggcctcggtgcaatgagcgtaatttgaagaccgcgagaaaggcgattttgttcacagatttccaattagattttcccacacaatggagcacataggggcaccggggaaattagtctctttatgcttaattaggattgcgtattgagtttccaggaagtgctccaagcaaattgcggcagtcagttgacagttgatctctgatctacctgggcacaagctgcggtctcgcattgtttgccgtttaattgcacttttgcaactgcaacacacccataaaaatctcaaccgcagggtccaaaacaatctgagtcaagtgtttctgcacgcaaacgaatggatccgaaaggacttctacctgctgtccagtgcgcaggcgcgacggattcggtttcggttttagtttcagctgctgtttgtgtacacaggacgaggttaggaaaaaggacgaggagcggaaaacggacatggctggtggacagcacttttggcactcgtcttgcggtctagcgcacatgtgttcaaattttgtgctgtatcaccgcagagggctcaaaccagaacgagagcctgacttgcgacacacttgacgttattgtgaccataaaaaaggctggagagggttaaaacaaatattagttaaaagtagggagtgaacatggcttgttataatatcaggcgaaatggttaggataatcatgtttcaactatgtagtttttattcttaaaaccagaactgaagagtaataatttcagtccgtctttacatggaccatcttttttttttttgcgtactttcccttttccatcattaaaattccaaattttgtgatatttttatattttttgtggtccaaattgaagcagaagacagtgctaacgagttgcagcatctgcggttggggttgagtcttctggcatgtgtccggatcgtcttgattgcctcgtttgctgtttaatcgccgttgacgggcataaatttcgatccatcctgggacaccccttttcagctgatttgtttagtaaacaagcggattaggcaccacggaaattcgagagcgccccaagttgggaagccatcgaagtgttgccctgatttcggtaaggtgagatactcaaattgggaagtgcccgaaatggtttcattgacaactgtcaccgctccggacgcaagcattcagactgacgtttctatatttggaatcatttcggtaacttgaaatttcccacagtttaccaacagttttcggagagaccacaattaaaatttaattttaaagcacacactaatttagttttttttttcccctgactaaagcgtagtctaattttccaatttgagcaggagtgcaacccctcagttttagtttctggcgtgtccctgtctcgatccttgttccttttttccgatcctgtcgcaggtggctcgttttaatgttttcagtttccgaggggaaagagggcttgcg

SEQ ID NO: 42296 - DNA, 1587 bp, DROSOPHILA
atgtccgttttccgctcctcgtcctttttcctaacctcgtcctgtgtacacaaacagcagctgaaactaaaaccgaaaccgaatccgtcgcgcctgcgcactggacagcagcccgtaaatcaccgaaaaggcaagaaacgagcaactggaagacaatggctctcgggtaggtgtttgaatcctttttccgcttcattttcaatttacgcaaatggacttcgattcgcggcgctggggaaaacggaaaatgagctctggatgcgctcacatggagcccgccaggtgctcaaattgccggagctccatgttcagctccactacgctcctctgggctccaggctgggcattagattagacaatttgttggtgctccggcgaacagtttgtgcctgcaagcgccagggtcgaggctctgtggaatttatcaccgcatttccccctcgaattttcccctgcgtgttaattgaaaattgtacggtaatgttacttatcgcgcggctatcagacgtctttccaaagacccaatgcgtctgggtaaccacaagtcacccaaatatctgtggagcttgcgtgtgccgtgtccatgttcgtgggcagcatgccacaccttgtggcaccggcaccttgggacaccaaggcatcacgcatcgacattgcctcccagcttgcgcatctaaatgggttgatcgtcgcaagaacttaaatccggcattcaagcaaaatgttttgctgagttttcttcccatcttcaattctgaggcgaaaactttagttgccttcctggactcacttgtcggtcagggtgaaaaaaaggtccgcgacgacatagtgagatggtcttttagaatagccactcaaaccacagtgggaactgatgtaaagaaggatgcgtccttcaagaacgattcagttttgaaaagttacgagacgtttatgaaaataattgttatgaatgttttgttgccattcactcacaacaagatattttcaacactgggcggatttgaaacgcagaaagctttggccaagtccaatgttaacaaaatgataggcacgattgttgacaaaaagttaatgacaaagccagaaagtggctcacagcctgaaattacctctgtcattaataaggccatcgaactccatcggaatggagaaatgtcccgggaagaggtgcaatcggagtgctgttccttcgttgtcgctgcctttgagacaactggtgacacggtgtatcacgcactcatcctgctggccatgttcccggagcaccaggacacggtctatcaggagctcaaagagctgtttcccgtggccggtgactttgaggtgacctacgacgatttgcaaaggatggtttttttggagcgcgtggtaaacgaaaccctgcgtttgataccatctgttccattcacaccgagggaaacaatacgggatttccgtctatcctctggagtggtcattccaaaaggagttggtattggtatcgatatatttgctacccatcgcaaccgggatcactggggtaccgatccatcgtcgttcaacccagatcactttctgcccgacaatgttggaaatatgggttga

SEQ ID NO: 42297 - protein, 528 aa, DROSOPHILA
MSVFRSSSFFLTSSCVHKQQLKLKPKPNPSRLRTGQQPVNHRKGKKRATGRQWLSGRCLNPFSASFSIYANGLRFAALGKTENELWMRSHGARQVLKLPELHVQLHYAPLGSRLGIRLDNLLVLRRTVCACKRQGRGSVEFITAFPPRIFPCVLIENCTVMLLIARLSDVFPKTQCVWVTTSHPNICGACVCRVHVRGQHATPCGTGTLGHQGITHRHCLPACASKWVDRRKNLNPAFKQNVLLSFLPIFNSEAKTLVAFLDSLVGQGEKKVRDDIVRWSFRIATQTTVGTDVKKDASFKNDSVLKSYETFMKIIVMNVLLPFTHNKIFSTLGGFETQKALAKSNVNKMIGTIVDKKLMTKPESGSQPEITSVINKAIELHRNGEMSREEVQSECCSFVVAAFETTGDTVYHALILLAMFPEHQDTVYQELKELFPVAGDFEVTYDDLQRMVFLERVVNETLRLIPSVPFTPRETIRDFRLSSGVVIPKGVGIGIDIFATHRNRDHWGTDPSSFNPDHFLPDNVGNMG

SEQ ID NO: 42298 - DNA, 3830 bp, DROSOPHILA
aggtcaccaggaaattggcttcattgtttaaaactggcacaaaacttagaacagcattattcttaaacgatggtaacaaaagttttcgtcgttcattccaatgattatctatacttacaattgattgtcaattaagaaacaagaaattataagaatttttcacttactctttagggtcagaaggcccagtcctaaacatgatgaaatggccttgtccaccacagaactcctgttgctgcaattgggagacgtgaaaatgtcctcaaggatcttaggttcacaggtcaccaggacgggagttaagccaatccaagtcaataccgtttttccatatattttaaataaaatggtacgcaggcgtatcttacctgtgtaaaaacgtttttagttttacctaattaaattcgaaaatataattacttacgttttaggcgaatgtactcaaaggcaagtccgataaacggaaagcccattggtcctggtaactttagcatcataatataaaatcttcttcgactccatagaaagtatacacataaaatgattgcaaatgcctcaaaaatttgcagcgtaagcatttcaatctgcgatttgggtgaacggtcttgaatgaatatttgggaattcggacgagctttatataggtgaaacatgcatagcatttaattgctctagaatatttttaactcgccctttcataaatgtgccaattccactttgaccttttgcacatttataaaaaataaattcctatttttcatatacttactttgagattgctttgaagccttgccggtgtaaggcttgctttgaaaaaagtagtgtttgtcttgtagtttctaagtatcttggccaagaagatctcgggtgaaacaaatcaatacttacaagttttaaaaacaatcataatcaaaactaccaaaccgttttatttgtgatggctgtataaaaagaattcttaaagccaatataatagaattttcaaaataagaaagttatgttataaagttcgtcgttcgaatgccagttgtggtgactgagcaagctttatgaccatgtggtcaacgaattccagattttcgtagggaaagctggtttttagcttgtagtttctgagtatcttgactaaagctagtttcgaagacatcagtccatatcgccagcctgatacaaataaaaaatgttgtattaaaaccttacttatacttatacttagtattttccaaggctaaccgacctatgcaatttctctttccctttgaaaatggaatgaaggcgtatggatgcctgtcgtggattttttccggcagaaagttttcgggattgaactgcgctgcttctgagccccaataatcagtgttgcgttgagtgttaaatatgtctatgctgatagtcattcccttggggatgacaactccatttgatagccgcaagtcctccagtgtctccctcgagctgaacggaacggatggcatcaatcgcagggtttcattcaaaacgcgatctaaataaaccaattgttgaagatcggtgtgggtaacctcgattcctttggccaaagggaagtgctccttaatctcattgaagaccatttcctgatgttcaggaaacatggccagcaaaacgagggcataatacactgtgtgggcgcttgtctcgaaagcagcgagaaccatactgctgcattcggcacctaactccattaaggacatttcgtcattacgaaaaagttcaatcgccctgtgtataacagtctttagttctgactcgcaataattttctgggtttgaatttagctttttgtccagaatctaaataggaaagttacaaaaatgtaaatcttcaatttgcaatctcaactcacgttgtttatcattttattaatggcagaagcgtctcttcttcgcagccattcaagtccgaagagtttggaaacaattttattttgcacaaagggcacgaaaatatttatgatggtcagtcgcaacatcctaagaaatatgggtatctataacctttataaaagaacaaactatatgggattcgcttacgactgataggtttttaatattgcgtcgttttcgaaattatcatctttcgtaacatcggttcccaatgtggtttctgtggacagtcaaaatttaattcatcccaaaattgaaatgatttctttacttacgagtagctatggcaaatgaccatcttatgaggtctgaaaggacatctttttcaccttgaccaacaaaggagtcaaaaacgctaaccagtaaatccgtttcagcattgaaaatgggaagaaagctgagcaacacactatgtttaaatgcgggattcatatgcttgcgtcgcgccatccacttggatcctgcatgagatgagattagtaaaatttggcgtatagaccacagtacagtaccctgtaatgtcagcagtccgtatcccatagaaagtgcgagagcattagttgtctgagaacttctgttgatgcagaagggtgacgtgaggactttttcggcaatctttggatctcgtgttatcacaattggagttgtgcctatccaggccatgtatgtggagccgtgcttatccatgtacgtggttcttgaactcattctgcctgatgatacggatatttttttttttggctaattcgagtttttaagccgcacttacccctgctaattataagatatcttacggaatttccaagtaaagggagtcccattcttcccggcaactgcatcatcaacatgtataatttgcgtcgactccatagaaaacggatccaaagaattaaactggcagcgatcaacaattgtatgactatcattttaatcaagtattgctcatctgagctgggaagaataaatatatattttaggaggctacattaatttgacgagttcgggttaagctcttttctaatagcattaccctaatgtcaacctattaatggctttgaactctacttcttaattactttgtacaatatttttgtgcaattccattccagctataatttattaggagggtccgcatataaattaagaaatacattttccaaatttgggatttacattttatttttataaattattaagtcataacgttattgtttaagataaatcttagtaacagcaatgtagtcccatcgagaaatatcctaaaatgaaagtctaggaaattctgataaaaatacgtaagttcttttaagttcgccgatgaaattctagtccaggtgactgagctagttccattccaatgttgtcaacgaactcgagatcttcgtatcgaaaagatgtgcttactttgcagtttctaagtatcttagacaaagcaagctttgatgacatcaacccatatttccaaccttaaagtataataattaatagaagtgccttttatgatggcaaacaaacccacctatacaattccgccttcccttcgaaaatggaatgtatgcgtaaggatgcctatcgcgcacattgtcgggcagaaagtgatctgggttgaacgacgatggatcggtaccccagtgatcccggttgcgatgggtagcaaatatatcgataccaataccaactccttttggaatgaccactccagaggatagacggaaatcccgtattgtttccctcggtgtgaatggaacagatggtatcaaacgcagggtttcgtttaccacgcgctccaaaaaaaccatcctttgcaaatcgtcgtaggtcacctcaaagtcaccggccacgggaaacagctctttgagctcctgatagaccgtgtcctggtgctccgggaacatggccagcaggatgagtgcgtgatacaccgtg

SEQ ID NO: 42299 - DNA, 1482 bp, DROSOPHILA
atgatagtcatacaattgttgatcgctgccagtttaattctttggatccgttttctatggagtcgacgcaaattatacatgttgatgatgcagttgccgggaagaatgggactccctttacttggaaattccgtaagatatcttataattagcaggggcagaatgagttcaagaaccacgtacatggataagcacggctccacatacatggcctggataggcacaactccaattgtgataacacgagatccaaagattgccgaaaaagtcctcacgtcacccttctgcatcaacagaagttctcagacaactaatgctctcgcactttctatgggatacggactgctgacattacagggatccaagtggatggcgcgacgcaagcatatgaatcccgcatttaaacatagtgtgttgctcagctttcttcccattttcaatgctgaaacggatttactggttagcgtttttgactcctttgttggtcaaggtgaaaaagatgtcctttcagacctcataagatggtcatttgccatagctactcaaaccacattgggaaccgatgttacgaaagatgataatttcgaaaacgacgcaatattaaaaacctatcagtcgatgttgcgactgaccatcataaatattttcgtgccctttgtgcaaaataaaattgtttccaaactcttcggacttgaatggctgcgaagaagagacgcttctgccattaataaaatgataaacaacattctggacaaaaagctaaattcaaacccagaaaattattgcgagtcagaactaaagactgttatacacagggcgattgaactttttcgtaatgacgaaatgtccttaatggagttaggtgccgaatgcagcagtatggttctcgctgctttcgagacaagcgcccacacagtgtattatgccctcgttttgctggccatgtttcctgaacatcaggaaatggtcttcaatgagattaaggagcacttccctttggccaaaggaatcgaggttacccacaccgatcttcaacaattggtttatttagatcgcgttttgaatgaaaccctgcgattgatgccatccgttccgttcagctcgagggagacactggaggacttgcggctatcaaatggagttgtcatccccaagggaatgactatcagcatagacatatttaacactcaacgcaacactgattattggggctcagaagcagcgcagttcaatcccgaaaactttctgccggaaaaaatccacgacaggcatccatacgccttcattccattttcaaagggaaagagaaattgcataggctggcgatatggactgatgtcttcgaaactagctttagtcaagatactcagaaactacaagctaaaaaccagctttccctacgaaaatctggaattcgttgaccacatggtcataaagcttgctcagtcaccacaactggcattcgaacgacgaactttataa

SEQ ID NO: 42300 - protein, 493 aa, DROSOPHILA
MIVIQLLIAASLILWIRFLWSRRKLYMLMMQLPGRMGLPLLGNSVRYLIISRGRMSSRTTYMDKHGSTYMAWIGTTPIVITRDPKIAEKVLTSPFCINRSSQTTNALALSMGYGLLTLQGSKWMARRKHMNPAFKHSVLLSFLPIFNAETDLLVSVFDSFVGQGEKDVLSDLIRWSFAIATQTTLGTDVTKDDNFENDAILKTYQSMLRLTIINIFVPFVQNKIVSKLFGLEWLRRRDASAINKMINNILDKKLNSNPENYCESELKTVIHRAIELFRNDEMSLMELGAECSSMVLAAFETSAHTVYYALVLLAMFPEHQEMVFNEIKEHFPLAKGIEVTHTDLQQLVYLDRVLNETLRLMPSVPFSSRETLEDLRLSNGVVIPKGMTISIDIFNTQRNTDYWGSEAAQFNPENFLPEKIHDRHPYAFIPFSKGKRNCIGWRYGLMSSKLALVKILRNYKLKTSFPYENLEFVDHMVIKLAQSPQLAFERRTL

SEQ ID NO: 42301 - DNA, 20776 bp, DROSOPHILA
aagtaatcgatttgagtccgttgaagaaattttattttatttacttgtatttcacttagatcttatggcttatgaattattgcaaacacttcatttcgtttcaattgattttcatttaattttaattttcatttgcattttcttaaaatgtcgtgttgcaaatcaagtatacgcaacgttggagcaactccttacaattctgtttatttagttgattaagttttggtttcacattgggtttttgtggcttggctgcgtctaaaatttaagtaagtcttttatatactaactaatgtttacattaaattttttggcttgcttgggatatttatttgaatagaacgcagtaacacccttttatttacacttgtattcagtattcgtttatcattatcctttatgcataaaaatggattttaagacttaaaaaatcagggtattcatacagatatcataaggtatacatacatatttacaatttatagcttaaggaaaccaaagaaatttgaaattcattcgatacttattcaatcgtgctacacgagctgaactacacatttgattttacttcataaaaatcctattgaaaatttgttagtgctctcaagacttatgaatcatttatgattatttaacttatatatgatacaaccatggcagattccaattgattaaaataatggaaatgttcttatctgttaagggcgaattctgtgcattctatttacacaattcttgcaacttttcaatgaaactatatgatatggcggaacataagcatgaatctcaatatcaatttacactcagatgggaaacaaacataaatcgagtatgattataactttaacttatgcccttagtcctgtatatattgccttgccgagggtgtatcttccttattctctctctgttaatatgtaattaaatcgagtaaaatcttaagtcgtagcctcctttaatgcgtaagatccaagtaactaggcgattgcctgaggacaactcaagtcttgtcctcggccactttggtggcactaattgagctgctgaccctgtggaaactggcccctgatttgggtcctgtttcccttgtcacatctgctgttgctccatcgcctgcgcgtagaagcgatgtccttgtggtggctttgctggtggcattcggctggcagatgtccctggccagtgcaaatttaataatccacaaaagtgtcagaagcgttgaaacattccgccagtgcaaatagccgtgacatccaattagcgcactccagctgacactgcccgacttaatggccgaggcggaatattcacctgccgatcagaatggtatgaaacaagttatttgagagcacagagcgatgtggtttttgccacagcaccagcataaatcccgtcatggttgcgaaaaactaattcaataatgtcactgcaatccgcccaatttcgctggcccaaatcgtacccaatccgcagccatcacaatcaatttttgactaaaaattaaatccatccagacacttccctcacagttcggctaaactcgaatacgttagattggataaataaagtgcccattgtaattaaatatttctattcaaaaattgaacagcaaacacgggtgcttgtgcgtatgcatgcggcttatgtgcgcccacctgggtgattcgtgaattacgtgtatggctaattcagctgatggatttttgtggcattcgcgtaaaatgtgcacatggcaaatattgatatgctactggcgttaccccgaaatgaactgaaagttgcaaagcaaataaaggcagcacctgatacccgcgccactcattagaactaagtgtgcactatgagtaattatgaaagtaatacaatatatattaaacataaatgatgaataaattaaaggttgagaaagtattcatgggtaatattaagttaatcatttacaaaaactgactttagtttaattagcttatctattttcaatccagaattcccaaagttcccatggcaataagtactcgaaaagttaaccacaactattgcaaacttattataggtatatcgcagcactagctttccattatccttctaatattaattaccaaaaccactgtacatacataagcgacggcaaaggtaacacaatcatgcgagtcatcagaaaatgggcctaaaaagctgtggtttgctgaatcagttatgcaatgcgggggcaacttgtcgaatatgtatgaaattacttatttaaaataattaaacttgaataaatttaaaagccaaccgcacgctgacattgccactttccgagcgcagggacgagttgcgagtgagcaagcaaattaattatgccaccggatggggctagggccaccagcctagctgattaaataaatcacagagagcgagcgagagtggagagtgcaattaaaataaaaatccctgaataaataaatgataatatcattaagttattaataatcatttgtcatgacacaacgctggcccggcggcaatacaaaaattgtaatatgccacaacaattgtgccgcagcaatgacattaagtttattaaccttttcgcacttgcacacgattcgtggaaaatgttattaaaattatgtaaaaagcgcaaagtatgggccttttctgtctgaaatttcattattgtcgggcactcagccaggctctctcacacacacatacgcgcacacacactcaggcacgcccacacacacagtcgtgtacattatctctggagcattgtttttcattatcctcggctttaacatccttttacacatttgcccagcttaacggggaaaaaaagtcatggcaagtgggctgcaagcctttcttttatctgcgtcaattagtcgaatattaaaaatacattaattccgtgttataaatgatgtttgctctcgccccacattgcggccatttcatagcaaattaaattgtgaatttatttttaaactcgcgacgcaaaattctttgacggttgtttgccctttctgacctacacacaagtactttacagacaggtcggcgtttttatggccattattcgctgcgtgacagtcctcccagcagctcgcacctgcctgcccccaaaaatcctgctgcgagtccttgtcctccgtcaggtgtcatcagtcacaatcgctcggcatttgttttgccggatctgggacgagtgcgggttaacactcggcactgtcgaatcatattgtcatctgctgaagtgcctttaagtagcgtgctccaaacggagagcgacaggctacaaatagcagtcaaacacaaacacagacgtccgacgaggacgaggacatgtcggagttgacagccaggaacgggaactggatcaggaatagaaaggataacacagccggcgggagagatatacaaacgatttaaatgcaagcggaaatttgtggcaaccacagcgcacagtcgaaaattatgtgacacagcggtcgaacgcatttttcaacggcttaaaaataagtcgcaaaggaatgccttgtattattatatttaatgcgagtgagtaggactttataatattttttaattttccaaaaaatgatttgttgtgcggaaatgaaaaagtttgttattattaaaaggtaattaaaacgcaatcgaatgtggtggtagctatcgtatgaaacattgccgaactatatacctcgctttttcctcttaataaactctttaattatcctgcacaaaaaatgtaaaagaaaaaatgtattgaaataatatgacatagccgtgggttaaataatattgatgtttttactttcaacccattggtggccgttcaagcgttgcttgttattcctatgttatgttttttttttttttttttacggtgtaagccaaccgagaggcaaatagagcagagtgagatgaaaaatcggacagatagctaaccattacgtagcgacatttataggtcagtcatcgcagtctccggcatcactgtcattgttgcaggcgtccttggtcctcggactcagcagtgtccatcttgcctggcggacattgagcaaataacgcaattgtggccatttcgagataacaataaaaccgcaactgttcctttgctggtaccgactctttcggtttgggcttgggctgggcttcggtttgggtttcggtttcatttcgtttcgtttcgctgccattgtgtttgccattgtaggaaattgtgtaaacaaaataaaaaccactcaaatggctggaacagtggtttgtccggggacaaaaggcggtaacaaacaaaatgttgttaaatttgctgtgctttcggcgtctatttgctgtggagcattctttttagcctaagttcaatttactttcataattggcggacttgtttctgagtgaggcacactgtgcgggtatttcgggaaaatcaaaagtcaaaccaaacacaaacgcatccgaataaaattcaattaagctaaatgaaaacttaattcaattgctcagccgtacagacacacaaacagttgaagccgctgcgccaacgacctcacctcatttccgcccaccacccactgaatcacccgcattacaaaccccgcccccttaccgttcagcacgtggaggacaatggtacggggcgcactgttcgaggggctgcacgtgtagttgccggaatccagtttgactacggccggaatgatgagagaagccgtctgcaacgaaataataaggacacagtcagggacgaacaggcaaatagagatacagtcaggattcctttgaactaaaaacatagcgaggataaactgaattcatgccgcagaacagcttttaaataacaaataagacaaataagatatcattttaaacaaattccaacgcgtatcttaaacctcaactgtgctgaaaaattttttgttctttatgttgttgttattatgttattcatataaaacatagatcagataaatagctaaggaaaccagaaagtgagggatttctttttaactttattatttaaacggaagtgcatatttcattttaaggacacgcgactgtattcacattacggaaatattattcatcagccaagccagccgtcatacgacatcgagtgtggcagacgctgactgctggggccgtattaaaaattataatttgacaaacgttgacaataagaatttaataaaaattattttacccgccgcgcgttcacgcccatttgcgtaatgaaaaggcatttaatgggaacgctttccagcgggcaaattgccaggagggcgtgccggatgcgaggggcggaatgcggtaagccacttaccgttatctgcttaatgaaactgctgcttggcagcatggttgtcgttgttgtggccgcagttgttgccgcctcagcatccattgttgtcagccaggcgctggttgttgctgctgttgccgcggagtcacctgtcgcagcagtagttatgcctgctgcagctcctgctgcgtatgcagcactggtggaggcaaggagtcctgctcctgtcgacgtcccagaagtcgaagacgttgcctccacttcggtaagcagctgagctgttgacgtctccgttgcaacagccactccagcagcggctcccagttcggaaacatcattctgggatatggcatctagaatatatgaacgtgttatggttaccaggccattaagcgtctccgaggatgtggcgccttctgttgatcctgtggccgttgtcgatggtgtcgctggcgttgtgctggtggtcgtggtcgtggtgctggcggttgttgttgtcgttgtggtggtggtgctggtggttggcacttccgctggcagatcgattcgttcaatttccgtacgccaaccgcgacgattatgcaaatagatttgcttctgattgtaaaaccaattaatgaaaagcggcggctccagagcctggctaattatgcaacgcaatttcacttgacttccggccttcacatgtcgcgttgactcgccaattaattcggttttcggctctacaaaggcagaaggggttaaagtgagacggatgcagtgaaagcaaggattcacacacatggatccacaagtttgctttcgaaagtgcaacggtcattgatttattgtcactgccattgcagatttataggtgtggtcaggggttggatttgattttgggcttgggtttcaattttgattttggtttcggttttgccgaatgaaggacaatggaatgtttggccagtactgtggtactttgacttctgacagcacaactatagtttgcagtttacaaaattatttgtctaataatagatgaatacaaaagtgaagattcgtctgattcaattagaccgttataccaattcgattaaaacattaactcattattaaaccaataaatatgccatatttacccacaatccttagatggacaatggcactggccttgggctccgtggacacctgacactcataggttccttcgtccttcagctgcacgtacttgatctggagggaccaacgttcaggattcggcgagaacacggactgaaagcgctgatccgcgatgaaggtggtctggtctacggtaaggatgtgcccgtccctcatccgcagccaggatatcggcttcttcaccagctgcttgacctgcccaaatgagacagcaagtttgctttcaattatcggcaaatcattcgaattgggggtttcaattttaaaaattaattcaattatccccgcacaaaagcacttcaaacagtaaatcccagctccgcgaccctggggctttggtcagcgcgtcgatgtcgatgatgacgatgatgatgatgtcagcagaactttggcttgtttgcgatgccgtacctcagctggatatactttggtaagctttacggggagaatttggtaaaaagggcacgtggatcgctggcggggcagtaaacaatcacgataacaaaacgacgattcatttgtgtcaataatgccaataataatttagtggcaatttgcccgggcatcgagcagcaaaacaaaataatatccattaaattgccagtcatcgatacggaagtgccccgtaaaccatttcccccattccccatcatcaggtatttattaacatttaaatacagacagtaactggcctgacttcctctaattacactgacccaataatacacaaatggcctaccagttgaacgagccaaaactgaaatctcgcaaattgtcactgccagctgcccccatctcttctctcagtgtgattatcggagggggtaactattgtggtaactggccgaaacgaaggcgtcgtgacagaggcaaatgactgtctttgaaccactgtcatcaactacattgtcggtgtcagggcccagacaaggaggaactccaaggacccggcgactacgacaacgacaacgtcatgattagatactataatcatttgcgttttatgtgcttgttgttgtcgccattgttgttgtggatgtcgccaaggaagtggcgcttcagatgccccacattcgcacacccagccacacccacatttgaacagtcgagctgttattgtcggttgagcacgtgctgtcaaaagccatcttctttaaatgaatatgaacatctccgcttggtcggcaaatcaaaccagtcgactgatgtgctcagacacctgagtctggttaactaaatgattaggaaaagcagacatttctctgcttgtgaaattgttcagactcaaccagtttaagttgatttcttcaaagtgacttgctttggatggaaagagtttgaggaaactttttcaaaaattcaattcgcaaccttggggaaatacgcgttctttaaaaatccatttagttaatcacttcctagtgtgtacatgcacatgcaaaattggcccacatatctgcaaagaatcgaaaaactcatcgatggaagccgcacagtgcggtgtgagagtttattaaattttgccacagtctccgccaggagtatcccggctctaaggacattattatcgggtctgagcatcgacattatactcggtattaagtgaagatgcttatccactgaggccgatgggcctgggcaagcagccaagtcaggacttcgtgtcgtgtacgtggcaagtaagtaagtaggtctcccctccacctttcgccattcgccaatctccactcgccattcgccaatccgccttctttgtccttggggctgacaaatatccctgtgtggcttgaacaggttccttccgcttgacattagctaatttaaattttcgacgcctgtggagatggcgttttattccaccgtaaagtgatggcccatcgcccgctatcaagatggcccagtgtttgccatttaaatattgttaattagttttagctgcagctcaaactgccccagaactgtatcaaccgctcgaatcggtagatccggctggccccaagtctagaaagtgccatatccacatccttcccgcaatggcttttatgttcccttgactgtcgtcatcaccacaaccacccacattgggactccgcgtgagcatcgttttccatcacagtcgagcagacagcaaagtttgctcataacattgcgaattttcgtctaaacttgtttgcaaataatttcttttattttgttttgttgaatctcctctgtcttcactggcgcgtcttcctctttcttttcacacaacaatacacctcaaagtgcctgctttcatatcttcaccagaataacacagcaaaatacaaaaaaggcaaaatacaaaaatgagagaaaacttttcgctgagttgccaaaataaaaaaaaaaaacgcaagaaaagaatgacagcgcggtggaagggaaagactgtcgattctgagtaaaaaaatactcaagtgcttgcaggcaaagcatttttgtggctttcccttcgttcgattcgttatccttcagctgctttctttgtgacgcccacggactcaaaatgtattattaattgattaggtttaagcagatttgaagattattccgcgcatataaatatattctcggtgcggtgcgctttgccaacagccacgagcgaatatgggaatatgggatacccgagattgtgtggacgtattcaaattatctgataaatattttacactagattgtttttcgatatcgatatcgagcggggaaagttcatggttgaggaaccattttgccggtggggagttggcaaacttatttaagcttaaatgggatccaataattttaaaattccaggggggataagctggaactaaattgtaattttcgttagcagagcatgtaaaaatatgtaatagactgaaaagaaaacaaattcctggccgaatttagaatggatttcagtcgctttaaatcttacgactattctatctccaataaagttttctttcataagttaatgcaaataaggtgagatcaaatcaagatatgggtagtaatatctactagatatgaccccttgcttatttctcctcgccactcagttgcatcctgtaattaactcggcacctaatcatattatagtttctttttctttgcactacaatcgctaaaaaagccggacagaataagttggcatctgcagccgtcagttgtgcggaatacttattcctggaactttaggttccgctgcacgccttggcagtaatttcctgtccaaacagtaaccagtaaacagtaactctggcagtggcagcgatagaatccagcagcgccaattataatttgcaatgcgaaacgcggatatgcggatgtgcattgtgcattgcgcggatgcagcacgcggatgtgcgaatgcagcaggcaaagagccaaggaacgacgggtaacttagttattagcggatgccagggcagctcactcgacccccctctcactccacgcgatttctgcgtacataaatgtgcacttatgtacttagcggatgtataaacgtacatagtgacaactatttgggtcatcgtttttgaggagctcccaacgaaaatgtgtctccttcagcgtctcctgccttctactcctcgctctggtattaaggatttttttgttcagtatttcgcaacgtggtgaaaaaaatatagctctcagaaagaagtttttatattctttttttggcatcattaggcaaaactttttagtctcttcctgcaaactttatatgtatctggaatatcccaaaaaagacctctggaacacgaactcaacgtaaattttaaaattaatttgttattacataagtgttaaacatacggatatagtgtgagcaaacctttgctgaatacaatcaatggaattactgcaacaaacaagagcttcgagtttttgtaataaattcctttcattcactcagtggaataagtaagttttcgtacatttagtaatttcaaatgaattcgtttgttctaagtctgtaagtctgtaaatcccatctatccagtcatatgtatatgattttaaaagtttaaaattttattccagtgtatccatctgcttatgtatgccctttggccagggcgtggcatcgacatcgacatcagcatcggcaatttccggttttgttttcgttcagttccgacagcggccagcgtaaattagttcaaagctctaaaatggcgaaaaaaaagcggagcggaagtcgggccaatcgatgccacatcccttgggatgtcgggttccttcgacttccgcattgccccctggtttttgaaccgattgaaggcgggaagagctgtagtatcagctgcttattgtaaattatcaatgattaataaaaatgctcctgtaaatattagcacagctaacaatttgccgaacaacttctctctgatggattgcttggtaaacaaaggagcatgaaagagtttgcttgaggtggttgattgaattttcaggaaattttccagccacttctatctcaaatttccaacaattatgctttgcagagaatcgtaagctcacgttttggtttggcagcgttctcatttctcgattctgatttcaatagggaaacctaatcaggtcccagtgactaattaaaggtggagtcatgagggaattcacacggtaaaaagtgtattataacctggccgtgaataaaatatttttcaattaagtatcaatgcaaaactatattttattgtgagccagtgctttgtcatcgacttattaaaaacattcaatcacagaccatctcttatattggtcgcatcaataattgattttctgtttagaacattggctttctacctcagtttgaagtttttaaaaacaacaaatatttcccctacattttatttatttgctcatgactttctatttgcaaattgtatcgttctctaagtttcctgtccaatttgtgcttcaaaaagaaatctttgcttaaataaaaaaattgtatacaaattcattttgttggactgacatcagagaatttctttcacctagaattaggacccctaattttattcacatttctgttctcggtaaaggttttttttcagtgtagctgctcaacttacattgcacggcagataggcatgggtgcccgcctggctaattattgtctggtaatcatctattgttggcggtggcttcagcgttgttgttgccaccggacggcgtgttgtacgcctcgttgttgttgttggcgtcgttgtggcaggatcaattgttgttgttgtcgctggagctactcctattgggattgagggggcatccccaaatgccgttccattcggggcaatcgaagctgcagatgtggcgttgtcctgcgtgattctatagctgtgctgctcctggacattccgattgctcataatcagattcgcctcgagggcagcggtcagcctcagtcgctgatcgccattgttgctaatgttattaatggctacattgttgctggagcgattcggagccgctgcatccagagctgcagccattgttggcctaaatgcgctggctttgtccagcgtctgggccatttgcgttgtcgccggaattaatgcctcgcgccttgattgagtcctttgaaatgctcgcccatttgttccattgctgtttaatattgatgtctcctccgcctgccctctgatggctggataatgggagaaaaaaggaaaatgaataggttgtgagtggaaattaatgacttagtgttttgttttctgttcgctgtccattgtccttagtcctctgtcccctgtcctctgtccctttccctgtttccatctctgtccctctgctccagaatatatatttcaaatgccatgatccccatttatctggaatactcgttacgacaattaaaacgatttacggcccccgacgtttttgttcaataaattaatcttcatttttcggctgcctaccttagtatcgaaattggcaaaagtttaagtcgagcctctgcgaaagtaaaattaattagctaattaagaacttgaattgatttgcatgtacttggggtgaagtggagtgaagtgcccgttttcaacgacagctaactttggtggagcctctgacatggccaaagctggtaattggtactaaactgctttttggtagccttggcaactcataaggcgccaatcgttggagtagaaaacaactggttcacggccaatacgccccacctgaaatcgcaataaagtatttgcgaacatcgactataaattatatgtctgtgacacacgattcgaaagcttatggggcttccccgaatgcagattgctggctgcagctttccatacactgcagcgcgtaaattctgccaaattggcaccataaatttcgctcgaaacttttcgaaagtcaaatgatagatacagccaccgaacgcgaaagtaaaagtgtgtgggtgagctctaggggtctgggaaatacttggcagtacgttgataagaaagttagtcaaagattggccaagactttgacttaaattgtatgcaactttatgcactttacctgccaactaaaaagtgtgtaatatgaattttgcttaaagtgaatgaaacaaatgtcggttttaaggaggtagtgtgtattgggcttgaagagcaaaccttgctcatgcatactaattttataatactgagaaacgtttacatattttgtctgcacaaacaacatcttgcgaatcggttctgcggcgcctagagatatgcaacaactttttccacaaagctttgctttctcttagctccattatttgcaatgcacatcggagtgtggtgtgtgtaacgtagtcttaattagctaatgaacagagatcacacagatacacggaaagaaatgggagccatcaagtgctcttcgccagccattgaatctcgagtggaatcgagcaaagccgagagaggagtcgagcactccggcattttctaatcaagtttagcgtatttcgccgggctcaaagtagatgcaaaactctggaagtccttttaatgattccggccaagtcgtgcgtgtgtctgtgtggctctcccttcattcttccttgccctgcctgtctgtgtgtgtgtgtgtgtgagagagcctgtctgtgcggcagtgtgtgtgtgtgtgttatcatgttttatgtttatgcttcgtgtacgtgcaataaagataaagcgattgcatataaaaactttttaattgcctgcactaatgatgcactgcagccaacttgattataataaagttacaaaaattccatttcccttcgagcacagtgggcaagaaatttctggggagagtggaaagtcaaagtagccaacaaattgaacttaacaatgtcaaggtggtgttattttaaccctaaacgaagatacataatttgtgtacttaaaatagggagaagctaatctgctgtttagaattattattttgttaatatatattaacagtttagtttactctaaaatctaatttttgtctctgcttgtaacgtgtctaaaactgtttcactttatgttaaattcctttaccgattaaaataaagcaatttatattaacagtaattaaatgaagaacttcttctttcctcccgactttcgtagaccactgtcagatgcttcaactcatttgcccgcaaaacatataaaaaccaacagctgccgtctggcggctcaaggacctcgaaacaggatgaggaattcgcggcagtaagtgggcgaaaagatgggcgtgtcggccagcgatgaaacaaatcaaaagagcataaaaaagtgcaataaaacaagcgaattactgggaagtccgcggcacaggccgagtgcaaaaagagagggaaaaaaaatgaaaacaaaataataaactgaaattattacgaaaaaaattatcatttagggcagcccggcatggggacattaacgatgtttggggaccaaaaaacgaagctggaagaaaacgcgacaactggcgaagccctaaaaaaatttgcttaatctttgcgcgccaaaacagaagaaaaagtcgcaaactaaaaagttgtaaaaacagacacgaacacagcccctctgcaccctacgccactgaaaaaacaaattgtgcgcaaggataaaaatacaaaaataaagaggagacacaaagcgatgggggatgggaagggaaatcaagtcgagcacttgacggaggacggaggaaaacttgcgtaatgagcctgatgggggcgggggaagagcggatggggaaaacgaaaactctcacacataaaatgagcttcatcatgcagaatttcattgactgtggaaagcgggggaaagcgggggaaatcgggaggcaatcgggaggggaaaagctgctgggactgcacggaaacttgagatgccgccttacactaaaattaaccgagcgcaggcaggctcccaagtcccgcgggcatttttagtcgaaagtgttttaatcaaacgcctctctacactttcatcagccggaagcgagttgagtttgccggagtccaagtttgtctgctgctgttattgttgcggagttgcttgtttttgtttgtgtgcttctgttattgttatggcaacagtaataacaacaacaacaacacaaaaacgactaactatgcgaaaaatcgcaactgagcagcggaaaatgttcgcaaattttaaataataacttatgcagacttttccgtagaaaattcaactttttcgacaatctcttctttagctgcgcaaaaatgtcctcgttgaacaatcgatttaaatttcatccttcgtatccatatgtttgcctataaattaggcccatttaattaatgaccgcatacaaattgggcttcaaataaaaaaaaatcagataatttctttacatttgttaagtgtcaagatttattttaaattaaacatattttatggactttttctaattaaaataaaagtttctctattttgatttaactaatgaggctttaaatcagtacttctttcagtgtgagcgcctgcaggctgactgatgtccttgtcgcgcctacgttgtgtccgtttcggcctgacaacatttcgacacttctcctaattatgatgggcatgttgcctggatggcatgatgaggctaataccgaggctgatggtgatgatgatgctggaaattggcttaaccccaaggcgcccggccgcagttatggagtggcgtaatctgcccccgccgccagttcgagttaactcgatgccaggaggactctcggccggacactctcatcaaaatgccagtctagttttggcccataatgatgacaacacggatggtatggggaaggacgaggcggggagcgaaaacaggccgtaactttgtgtaataattgttgttaagcgtttaagtcgggcgtgccactttggcggccaaccaaaaggcatctcgtgggaaaataacccgagacttgagcaacttatcgctaccgcaaggctgtacggccaaaaagccaacaaaaggggagtttcgagtggtcggagtggccaggacctgcagttgagttgggttcgctgctggtggaggccctttcgagttgccttactttttgctacaagcattcaatgatgctctcaactgagcagctgaatttgattaaacaaaagtaaaagtttttaacttttttcgctcttccactttgcacccaccccaaccatccttctggcccacttgttacccagattgttgttatttcccgttcaattggctgaatctcctcaagcgtttcgtcaatcactttcatggccaaaagaatcgaacagcttgcgagaggaggtaaatatcaacaagaaaaaaaaacgaataaaaggggttaagcaagggggtggatgccaaagttgcgagcttttaacacaatttaaggcatccagaggcgccccccgccatagttcgccttccagggaattttcgcccattgctcggccttgctgcagttttttccagcacaccctaaacttttctattgaaaaaacaaaattctgatagggcaggagtgcagcgtttgatcgagtttggttcattgatgaaaatgtcgagagtcactttcgttatgctttagttttaacttttagtttagcaattcctgccttttcatgttgctattttgattttaattacctttttctctctcttgtttcccctttgaattcgttgtttttatttgctgaaaattgtttcgcaaggactcggtcaaagcgtgtttttaatttccttttcaagaaaaaggtaaaaatcgtggacaattttggaaaaccattaattaacagggaaaaccattcaaacggatttgagcgattaaaatggttttacttcagttactcacttaaattattcgaaaaggtaggcggatgcttctttagccaacaacttctttaaaacagtttaagcgactttttttgaatacacatatatgtattacttcacaatgtaaaaatctgcgactgagtacacaaatttttaaacattttcccagaatgagttgcgatgcaaaaataccagcataatttaaattgaccctgacaagtcagtcaaaaaattccttagtaaagccccacgcccttgcgcacctttcttcagacagtctgcgctaaaatatgcacaaagaccgaaagatgtatgggaggcaaatgccctaaattcgcccacaaaatgcttttaagccgcgcatatcaaattgttttccccgaaaacataagaaaaagattcagcaaaagggggaggcactgagctggtggaatagtcatttaatatgcgacaaatgtatcgtgagaaataatttcatatttgacgcagcttacccggcaaacagatgagcagggccagcaagatcaggcgccgcggcatcttggccaactccattaaagtgccaagcaaattgataatccttgctccgtgtcgagtctggtattggacgtgcttcgcgccccgagctccgcgtatcccgtatctcgttccgggtttccgattcggttccttggttcgcggtccttggccagctaaatcctgtggccttaactgggtcacattggctgtctggcggcgttgggccgctgaaggtatagctggagctggagcctgtgtaaatttatcccctgcctcggcggggattccgagtccaaatccgctcttgttggatgctgctgctgttgctcttgttaatatcgcgtatacgccttgacacgaactgcagcaatatcttcttgtgcttcgcgttgctggcgttttctcggcgcacaaaatcgcaggtttaacatattttcaaattgcacttgcacggtaagcttgtcggggaaatctaaaataactaaaagctgaaaatgtcgtaggggaagctgagcgaggcaagacaacacaacacgtggccaattttaaatattcccacaatgtgcccgtcgagctgggtctcatcctacattttaggtcttgtattcccatattctctggcaactatggccccaccggctcttatgctttccctgattcctctggcccgtgtcccagtttatggccggcattttgcgccgcgtcctgtttttgatatgtttgtgtaagttttcggatggcttgggtaatgtgggtgctcttggcattagttgccctaacgaggtgttcccatttcatcctagcatttgcaaatctgactcaaatctgttcgccgtgtggcataaaatacataaataaatgatttttacatatagagaggaaagctgagaaaatttaaatataatccatgaaaaataatttctaaataaaaccaaaaagttactttataaatatgcttgaaacctttgagtggaactcataaaatctaatctttacaagagttgacccatctgggtatcatgaaaaagtaaccatggcagttttcagcgatatcctggcgaatttggttttcggaatccgaacacatgttgtgtaagcctgagctggggcattccatttgaccaagctcagttgccgtcgtttgctcggtttcccagctactgcggctgcttgtgttacctcatctttctttcttttacgccccagactatttggcattaacgaaatttatttatgcgggtgtttagtggggcgtaaaaggagtacatatggccatcgcgtccgggcgggcgaacacgcccaccgagtccacttacggatgcaggacacgcgcaggatgaattgaaaggattctcgatggctagccaaggtgtaggtgtaggtaggtcgggctgactggctggctggctggctggttggctgagtctggccaagaataatgatttaaatgctgttttgtctttgccaacagatgggcctgaagtcggactacgagtggcagtcggagtttgagaaatgccaggcatacataagtaatggcggaggagtaggtggcccaatgaagcgttaactcaaatgttaaacaaatgtaatgttccggacgactgggccgtattccctccataaggataacgatgggaacgagttgggttggaccttgagccagagcttggataacacaaataatatcaaattgattgcacaaacaaaacagcagcggaagtgtaaatgatttaacacaattcctatttctattcgcattccgcatcctcgacttttgactgttgtccgtctcggtcttcgtcttacttttggccggagccatctgctgttcaaacactcagacttttggcccatgctcgacggagtggaaagcgggaaattcccatctcttgtaatttagtttattttgattgccgttcagcttcgcaactgggtcattaattcgttattgtttatggggttatcttaaaacagtttttgtggtaggtcttcttcaactgttttgtaacagcaatttagttcaacggattgtacagatttattctttcagtcatagtagatcggaaaaacaaatgtattttaatttttcaatttcattgctgattttattattttttaatgtttcctttaattagaattataacccttagtctcgatctctgtgattatatgaccaaaatatgataatttggtttatttttaaaaattcttataatttgtttagaccttctttagttaaagttcacaaaactgttttgatttccgtacttatcgcttgttttcgttttaatttatctttaggcttcaatttgattaaaatcacttaatgcgtattttgtttacgacacaggttcgatcactgtatattttttggcaagatcctctttcaatattaaccatttggggctctccgtggaggatgtttaatctgcgttcggcggctgtgaagcgagaagcgaccacgcttggcaccggctaaaagtaaactaagccaactgacgacaccttaacaggccaagtcaatcgggcccgaagtgagccgaagagtttggctccgtggcgtatacgcaatatgcgctaacagcggaagagaaattaagctgatgctgttagtgagagttcactttcacagcagcacaaatgcctgccaacatgttatgttaactcttcaaaatctgtcaacgaaacaaatgcaattacacgggtaaactgctccattgttatggcatgttttatgcattgagcagttaggcaaattactcatttggattttatgtaaattgtagtctgtgaatgcataaaccttgagtgagacctaaattatcccgtaagcctagtcaatttcgtggcaaagggtaagtgggagggaaaggatgcaatcatagcaccgtttatggcggcttaacagtgcgataacataattcctcattaacgtcgaaccaaaggcgcctgtacaatgctaaaaataagtgctggccaaaaaagaggggcaaaaacaaagcggatacgaacgaaagtgggacagcagcagcagccagagaaaaccgcatcttggacggatataccatggcaaagtgcaaagcactgggataaccgaggatattgcgggctggaaggaaaacaaaggaccaaattataatgcagacgaacaggacatagatgtcgccgcgaactgcaaagacattcgcgactttgaagggtggagttcggtttcgagaagaggaaaaatcgtagaaaaaactaaagcttttgcataaaattcaatttgtcgtgtgcagcagccatgaatatgctgaactccggctttaagccgaacctgatgatggtcccacggctcccactccgccccctgggcgtaacatatgcgcgaaattacttacgtagtgctggcagtgacagttttggatctggaaccaccccagtgccagcccgaaacccaattccaacctcagccccagc

SEQ ID NO: 42302 - DNA, 2503 bp, DROSOPHILA
tcgcttctcgcttcacagccgccgaacgcagattaaacatcctccacggagagccccaaatgcttttagttattttagatttccccgacaagcttaccgtgcaagtgcaatttgaaaatatgttaaacctgcgattttgtgcgccgagaaaacgccagcaacgcgaagcacaagaagatattgctgcagttcgtgtcaaggcgtatacgcgatattaacaagagcaacagcagcagcatccaacaagagcggatttggactcggaatccccgccgaggcaggggataaatttacacaggctccagctccagctataccttcagcggcccaacgccgccagacagccaatgtgacccagttaaggccacaggatttagctggccaaggaccgcgaaccaaggaaccgaatcggaaacccggaacgagatacgggatacgcggagctcggggcgcgaagcacgtccaataccagactcgacacggagcaaggattatcaatttgcttggcactttaatggagttggccaagatgccgcggcgcctgatcttgctggccctgctcatctgtttgccggccatcagagggcaggcggaggagacatcaatattaaacagcaatggaacaaatgggcgagcatttcaaaggactcaatcaaggcgcgaggcattaattccggcgacaacgcaaatggcccagacgctggacaaagccagcgcatttaggccaacaatggctgcagctctggatgcagcggctccgaatcgctccagcaacaatgtagccattaataacattagcaacaatggcgatcagcgactgaggctgaccgctgccctcgaggcgaatctgattatgagcaatcggaatgtccaggagcagcacagctatagaatcacgcaggacaacgccacatctgcagcttcgattgccccgaatggaacggcatttggggatgccccctcaatcccaataggagtagctccagcgacaacaacaacaattgatcctgccacaacgacgccaacaacaacaacgaggcgtacaacacgccgtccggtggcaacaacaacgctgaagccaccgccaacaatagatgattaccagacaataattagccaggcgggcacccatgcctatctgccgtgcaatgtcaagcagctggtgaagaagccgatatcctggctgcggatgagggacgggcacatccttaccgtagaccagaccaccttcatcgcggatcagcgctttcagtccgtgttctcgccgaatcctgaacgttggtccctccagatcaagtacgtgcagctgaaggacgaaggaacctatgagtgtcaggtgtccacggagcccaaggccagtgccattgtccatctaaggattgtggagccgaaaaccgaattaattggcgagtcaacgcgacatgtgaaggccggaagtcaagtgaaattgcgttgcataattagccaggctctggagccgccgcttttcattaattggttttacaatcagaagcaaatctatttgcataatcgtcgcggttggcgtacggaaattgaacgaatcgatctgccagcggaagtgccaaccaccagcaccaccaccacaacgacaacaacaaccgccagcaccacgaccacgaccaccagcacaacgccagcgacaccatcgacaacggccacaggatcaacagaaggcgccacatcctcggagacgcttaatggcctggtaaccataacacgttcatatattctagatgccatatcccagaatgatgtttccgaactgggagccgctgctggagtggctgttgcaacggagacgtcaacagctcagctgcttaccgaagtggaggcaacgtcttcgacttctgggacgtcgacaggagcaggactccttgcctccaccagtgctgcatacgcagcaggagctgcagcaggcataactactgctgcgacaggtgactccgcggcaacagcagcaacaaccagcgcctggctgacaacaatggatgctgaggcggcaacaactgcggccacaacaacgacaaccatgctgccaagcagcagtttcattaagcagataacgacggcttctctcatcattccggccgtagtcaaactggattccggcaactacacgtgcagcccctcgaacagtgcgccccgtaccattgtcctccacgtgctgaacggtgaatattccgcctcggccattaagtcgggcagtgtcagctggagtgcgctaattggatgtcacggctatttgcactggcggaatgtttcaacgcttctgacacttttgtggattattaaatttgcactggccagggacatctgccagccgaatgccaccagcaaagccaccacaaggacatcgcttctacgcgcaggcgatggagcaacagcagatgtgacaagggaaacaggacccaaatcaggggccagtttccacagggtcagcagctcaattagtgccaccaaagtggccgaggacaagacttga

SEQ ID NO: 42303 - protein, 662 aa, DROSOPHILA
MELAKMPRRLILLALLICLPAIRGQAEETSILNSNGTNGRAFQRTQSRREALIPATTQMAQTLDKASAFRPTMAAALDAAAPNRSSNNVAINNISNNGDQRLRLTAALEANLIMSNRNVQEQHSYRITQDNATSAASIAPNGTAFGDAPSIPIGVAPATTTTIDPATTTPTTTTRRTTRRPVATTTLKPPPTIDDYQTIISQAGTHAYLPCNVKQLVKKPISWLRMRDGHILTVDQTTFIADQRFQSVFSPNPERWSLQIKYVQLKDEGTYECQVSTEPKASAIVHLRIVEPKTELIGESTRHVKAGSQVKLRCIISQALEPPLFINWFYNQKQIYLHNRRGWRTEIERIDLPAEVPTTSTTTTTTTTTASTTTTTTSTTPATPSTTATGSTEGATSSETLNGLVTITRSYILDAISQNDVSELGAAAGVAVATETSTAQLLTEVEATSSTSGTSTGAGLLASTSAAYAAGAAAGITTAATGDSAATAATTSAWLTTMDAEAATTAATTTTTMLPSSSFIKQITTASLIIPAVVKLDSGNYTCSPSNSAPRTIVLHVLNGEYSASAIKSGSVSWSALIGCHGYLHWRNVSTLLTLLWIIKFALARDICQPNATSKATTRTSLLRAGDGATADVTRETGPKSGASFHRVSSSISATKVAEDKT

SEQ ID NO: 42304 - DNA, 3932 bp, DROSOPHILA
ccccataaattagccttacatttgcgtcttaatgcccttattgattgcctaatatacattggaataatattgcaatacttttatttggctggatagcaaactatatttatttaagtggtgcccttgtttgataaataatatccattaaatgtcacttgaaaaattgttttgtcttaacttgcatagctgtttaaacaaactatttattcttctcatccttcttaattataagttatcccaatttttgttagtgtttctaaccgacccctctcttaatccccaaatcgaattaacttaatcgatggaaaatggcggcaaatgtaaccccgtctttcccggcgacgttcgacagcttccgtctggtttggtccggaattcgcggcggaaacggatgcgtccaattcacagcctcggtccaaagtgattggccatgtaaatggcattgggcttttggcctggctcagtctattgccaactgttgtcacgttcaaatggcgggaatcgcagggctgtttctacaactttgtctgtggtgtaatcttattcatcaattgatagcatcctgttctcctcagcccattagtgagttcaagcttaatacttcggccaaaacatttattaattgcatacaagttgctttttgtcttaatttgcgtgttatatgaaaattatccttctaaaagaacgttcaaaaaacgtaatgatggtttttgctttataaaaatagctatagctatgataacgcctatataattgctgtttttgatgttaaaaatgagatataaagagtgagtaaatcatagccaattaactttatttgtgattattatacaaatgagcccagtagtcgcttcaaaattgaccacaatattagggcagcaccgccacaaagagtgaactgcagcagccgatgaagaaattcaaacctgtgacaaaaacataagaaataataatagctactattatagaatatatgggatacatattacaaatttccaactcaccttttatagatctttcgtcccctttccactacctcctgtcctggttcctccttggcgagatagatgcgaactccggccagtgcctgtaggaagtaatcatcccagtcgacgctgctcatattaaaatcgtaaagcttttgatcctcgacagacattttggcccacaacttgcgggtgttgacggtatcgaacgaccaggatgtgatcacaaagggtgccagaatatcaatgttcttgtggatcttgtcgtacaacttgatcatacgtggctttttgccccataaacgcaaggccagatcaatggcatagccggggagcaggtgataaaagatggccgtgaaccggaatagccagggaatggtggtgcaatgcagaaacggcaaccacatcatcttggtcagtggatacgtgtaccgcagcctcgccgccttgtcccgaaatccaccccaggttatcaggttatcattatttggcgtaaaattgtagataggtggctccggcgatagcttgatacttgtatcccgggccgtgttccaagcgcaggtcagcaccatattgacgcagtaatccacgggtacaattccagcctgggccttaagattaagcagtgtgatatgcagtattccgaaggctgctccgtagagaactgcaatgggtccgtacaggttgtcgatccagccgggcatgggctccttatagctggcaattactgtgcaagatgtcggtttattcgaggattttaaattccaacgacatatacttactgacacccggacgaaaaatgctaagcggcaaatctttcgcctccttctggatcacctgctccgtcagagccttggtatacgtatacgtattgggatacttgcccatcagcgccggtgccattttatccaatagctcaggacttatgctttccagcagctctaggatcttttcggcagggcaggtcaagtgctccggatagaagcgttcacttacgtgctccaccacgcagtttgagtacgcggtggacacatggacaaaggactccaagtgggacatctccttggccagttgaatcatgagtcgggtggctcgggtgttaacagccagggcgatgtgcagcggctccacaaaacgcacagtggccgccgtgtggataacaatctgcacctcatctatcaaaacctgacgatcgctgttgctcaggccaagatccggctcctggcaatcgccaccacaaggtaccacgcgcttcagagcctcgggatttgttttcattagattaccgaatacctgaaaccaaagtgttttacttttgcattttgttgtaacgaacactttgtatagaattgattcttatcctaagtttgggaaatgattaaagatgtcttaccggatccttatcccatgcggcgcatcgctcccgcatttcctggccgcgtttggcacggagcagcacatagatgcgcttcacctcggtggtgcagagcagcttcgcaatggtcactgaaacggcaataaacttgttcttgatcttgaatttgatctgatatttggaactgttacagccggttctgcgtatcgcttgttttgggcatcaaacttttaaccatctgggcagatgcatgtcatctatatatcaaatagcttgcaaaagtccaaatcacaggaatttggcctttaaatttatgtgcgtttaatgcatttacaccacactttagcagatctattgagtcaactgtcaactagaagacggaataccttttccaaggaatccactgccgcctgttaggaagacagttttgtctttgtaaaaagattgcacatccgttgccatttccgatgggctcttattacgatccttttcgcgaagacaggccggaaatccgtattccgtattcagctatccgtaatccgatgtccgacgtagaacggcgcagacgcgactgatgcttgaatgagaggtgttcggtgttttttcaccagttatttatacccagaatcgtcgatcgcaaaatatcaattgtctggccaaactctcactcacacatccatccacatgtccaatggcatcgcgtcgtaaacacttacttagcgagctggagaagttcaccctgcaacgctgcacattacgtatacgcccagttaaacatgggccattaaacctaaaccatgagcattgcagttgacctgtgctaagcaaacaattagccttgcctttcttacgctgaaattacaatgaaattagaacccgagattttttatcactttgcggtccagaggatccgatcggaaccgcttaggtgtcaagtggcgtggcggcctctgatatatccatttggctaattggaaaacgttgtgcgccgggttgaagtgcatcccagggaaagggagtagtaaacccggtagttggacagatggtttgtggtataggtaattggattcgagggtgtgcacccatgtgctgagtgtgtttggacagtgagtctggctcgagcctaatgaatgtgcttggataatgagtggccgattgactggctaatttatatgggaaatcgaaatgcagacgtgttaatttattcgctattttgtaattatatagttcgaacaagcttcgattgccaaacaattgcgcaacaattggtgcgtatgaatattttataaacagatactcgaaccgcgtagaacaaattcgactttaaacttcctttacatttcacatttctaatagacttttcaagaatccaatattagttattacgccgaatacacccctaaacacattaataaaaatttttgttttgagatccatcaagaacaaactcattatttatttagccttcaacccggtgcatgttttaagaattaaaaaaaaaaaaatagttacagtagtggcactaaatttgtgattaataaccaaatagagccaccaaataatgtaactaa

SEQ ID NO: 42305 - DNA, 1522 bp, DROSOPHILA
tcgcgtctgcgccgttctacgtcggacatcggattacggatagctgaatacggaatacggatttccggcctgtcttcgcgaaaaggatcgtaataagagcccatcggaaatggcaacggatgtgcaatctttttacaaagacaaaactgtcttcctaacaggcggcagtggattccttggaaaagtgaccattgcgaagctgctctgcaccaccgaggtgaagcgcatctatgtgctgctccgtgccaaacgcggccaggaaatgcgggagcgatgcgccgcatgggataaggatccggtattcggtaatctaatgaaaacaaatcccgaggctctgaagcgcgtggtaccttgtggtggcgattgccaggagccggatcttggcctgagcaacagcgatcgtcaggttttgatagatgaggtgcagattgttatccacacggcggccactgtgcgttttgtggagccgctgcacatcgccctggctgttaacacccgagccacccgactcatgattcaactggccaaggagatgtcccacttggagtcctttgtccatgtgtccaccgcgtactcaaactgcgtggtggagcacgtaagtgaacgcttctatccggagcacttgacctgccctgccgaaaagatcctagagctgctggaaagcataagtcctgagctattggataaaatggcaccggcgctgatgggcaagtatcccaatacgtatacgtataccaaggctctgacggagcaggtgatccagaaggaggcgaaagatttgccgcttagcatttttcgtccgggtgtcataattgccagctataaggagcccatgcccggctggatcgacaacctgtacggacccattgcagttctctacggagcagccttcggaatactgcatatcacactgcttaatcttaaggcccaggctggaattgtacccgtggattactgcgtcaatatggtgctgacctgcgcttggaacacggcccgggatacaagtatcaagctatcgccggagccacctatctacaattttacgccaaataatgataacctgataacctggggtggatttcgggacaaggcggcgaggctgcggtacacgtatccactgaccaagatgatgtggttgccgtttctgcattgcaccaccattccctggctattccggttcacggccatcttttatcacctgctccccggctatgccattgatctggccttgcgtttatggggcaaaaagccacgtatgatcaagttgtacgacaagatccacaagaacattgatattctggcaccctttgtgatcacatcctggtcgttcgataccgtcaacacccgcaagttgtgggccaaaatgtctgtcgaggatcaaaagctttacgattttaatatgagcagcgtcgactgggatgattacttcctacaggcactggccggagttcgcatctatctcgccaaggaggaaccaggacaggaggtagtggaaaggggacgaaagatctataaaaggtga

SEQ ID NO: 42306 - protein, 470 aa, DROSOPHILA
MATDVQSFYKDKTVFLTGGSGFLGKVTIAKLLCTTEVKRIYVLLRAKRGQEMRERCAAWDKDPVFGNLMKTNPEALKRVVPCGGDCQEPDLGLSNSDRQVLIDEVQIVIHTAATVRFVEPLHIALAVNTRATRLMIQLAKEMSHLESFVHVSTAYSNCVVEHVSERFYPEHLTCPAEKILELLESISPELLDKMAPALMGKYPNTYTYTKALTEQVIQKEAKDLPLSIFRPGVIIASYKEPMPGWIDNLYGPIAVLYGAAFGILHITLLNLKAQAGIVPVDYCVNMVLTCAWNTARDTSIKLSPEPPIYNFTPNNDNLITWGGFRDKAARLRYTYPLTKMMWLPFLHCTTIPWLFRFTAIFYHLLPGYAIDLALRLWGKKPRMIKLYDKIHKNIDILAPFVITSWSFDTVNTRKLWAKMSVEDQKLYDFNMSSVDWDDYFLQALAGVRIYLAKEEPGQEVVERGRKIYKR

SEQ ID NO: 42307 - DNA, 3714 bp, DROSOPHILA
aaacaattagccttgcctttcttacgctgaaattacaatgaaattagaacccgagattttttatcactttgcggtccagaggatccgatcggaaccgcttaggtgtcaagtggcgtggcggcctctgatatatccatttggctaattggaaaacgttgtgcgccgggttgaagtgcatcccagggaaagggagtagtaaacccggtagttggacagatggtttgtggtataggtaattggattcgagggtgtgcacccatgtgctgagtgtgtttggacagtgagtctggctcgagcctaatgaatgtgcttggataatgagtggccgattgactggctaatttatatgggaaatcgaaatgcagacgtgttaatttattcgctattttgtaattatatagttcgaacaagcttcgattgccaaacaattgcgcaacaattggtgcgtatgaatattttataaacagatactcgaaccgcgtagaacaaattcgactttaaacttcctttacatttcacatttctaatagacttttcaagaatccaatattagttattacgccgaatacacccctaaacacattaataaaaatttttgttttgagatccatcaagaacaaactcattatttatttagccttcaacccggtgcatgttttaagaattaaaaaaaaaaaaatagttacagtagtggcactaaatttgtgattaataaccaaatagagccaccaaataatgtaactaatacagttttaagaatcctgtccaatacataaaacctgtaaaaaccaatgtggcttacagttattttctggagataatttcatttaagagataaaaaaaaatagttacagtagtggcactaaatttgtgattaataaccaaataaagccaccaaataatgtaactaatacagttttaagaatcctgtccaatacataaaacctgcaagaaccaatgtggcttatagttattttctggatataattttatttaacatttacctttttaaaatccgctttccctcggcaacggaatccggcgtccggaggtccttaaacaaatacaatcgtattccgtccatgagacacgtaaaatactccttccagttcaatgttgacatatcaaagttgaacatctccttctcctccggcgacatggactgccacatttcgttggtatttttcatgtccatggtaaaggttttcctagagaagggcagcaaactccgcatcccctcgtggaccttgtgataactcttgatcatcatcggcttttggcctttcagacgcagcacaatgtctagcaaatatccaggcagcatgtgatagaataagataccaatgttatacagataggggcatctggtgcaatgggtaaacgggtaccagatcattttcgcatttggtacctccagaccattttgatagcatagcccagccagatcttcataagtcaccaaatttgattcgctgggcgtgaaagcgtaaatgggcggcggtccatttttattttgctttgagatcttagctatctggacagctgaggcgatggccacgttgacgcagtagtcgaccggaactatgggagcattaactttcagattaaccagcaataagtgaacaaacccgtacgcagtggcaaatatcatggctatcagcccttgcaggccatcaacccatccttgcactggttctttgaacgtggataaaactgcaattttagattgtttaaaagaattaatcttatgtagtgatgtatagataatatccttagtcgcaatcacttatcaccgaaacaattacttactgatcgctggtcgaaagatgcctacgggcaaacccttcgcctcctcctggatcacctgctcgcccagtgccttggtgtaggtatatgtgtttgggaattttccaatcaaggctggtgccatcttttcgaacgtttcggagctgaccgaattgtgcatgtcaagcaccttgtcaacgggacaggacaggtgttccggatagaatcgctcctggatttgatccaccacacaattggagaacgctgttgagacgtggacgaaggactcgagcagtcgcatttccttcgccagctgggtaatgagacgcactgccctggtgttgatgaccactgcatgttcgagtggctcctcgaatcgaaccgaagcggctccatgtatgagcacctgcacctccgcggccagtatccttcgatctgtctcgctgatgcccaagtccggggcacagcagtcacccgaaatcggagtcatcttttccagcgcaagtggatttttgtttagtagaacttcaaacacctgcagggaggatgttttccaaggaaccaccattgttacaaataacgtaatatttttcacttttcacttttatcttgcattcttttaaaattttcactcacaaattgggtggatctgcactcacctgatcctttttccaggactcaaatcgtgcttccattttctcaccccgcttggttctaaccaggaagtatatacgtttcacatccgtcgcccttaatagcttttctacgaccactgtaatatttagggcaaaacaaaaatattttataaatgttcttctattggataataatcgaccgcgcacctttgccgagtaatcctgtgcctccggttataaacaccgttttgtccttataaaaacttataatttcactcgtcattttgcactgcggtagtaaaattcacttggcgggttcacttcatcaaatggacattttttcttcatctatatttatttataccaatttaaaccaacaccaatcacaagaaaatgcaacgatatgcaagcctaactagaataatttgcactttgtgaataacttaaaaatcgtaatacagaaaacctcaataattgcaaccaagaaaatcaagaatatagctaagtaggacatgcaagaatgtttgtaggaatacattattttataaaaaaaaaaaccgaataattatttggatggggtaaaactaggaatagattttatttaaaaacagtgtgctattaagacctagtgactcctgtacatgaaaataatactattcatcattccatacatgtcacatttttgtacatttacatagggctctacgtttgcattctatcaaatcaattgaaaggtacgaaagtagcgtaaatgcagacaatttcggaaaatgcagtttgaaagcatctattttatatagaatacaatattcaaaattaacttatcacactatttacagtgaacaaaagtatatgatatctttatatcatttctggtatacattaaaaacaaatcctgcacaaaaaggaagatattaccataaattgattaaatttaataatgtcaacttcttaaatgcataacattcaacaaaacagattattatttcgatcgtttataagattagttcctttgaacaagtttaatccaaaagccgcctttgggtgacaactgaaatccggaactaatgagctctagtggaatgcaggatttcttggcaggggcaaagcggtagtccttcaaaagatagtagataacagcctttgcttccttgttgcattcccgatcgaaggcaattgccggcggccactttcgcagaacctcgctgacgacctgatccagatacttcagttccttgccctccaggtcttggtccacttgctgtacctcctcgtatagcctctgctgcacatc

SEQ ID NO: 42308 - DNA, 1548 bp, DROSOPHILA
cgcagtgcaaaatgacgagtgaaattataagtttttataaggacaaaacggtgtttataaccggaggcacaggattactcggcaaagtggtcgtagaaaagctattaagggcgacggatgtgaaacgtatatacttcctggttagaaccaagcggggtgagaaaatggaagcacgatttgagtcctggaaaaaggatcaggtgagtgcagatccacccaatttgtgagtgaaaattttaaaagaatgcaagataaaagtgaaaagtgaaaaatattacgttatttgtaacaatggtggttccttggaaaacatcctccctgcaggtgtttgaagttctactaaacaaaaatccacttgcgctggaaaagatgactccgatttcgggtgactgctgtgccccggacttgggcatcagcgagacagatcgaaggatactggccgcggaggtgcaggtgctcatacatggagccgcttcggttcgattcgaggagccactcgaacatgcagtggtcatcaacaccagggcagtgcgtctcattacccagctggcgaaggaaatgcgactgctcgagtccttcgtccacgtctcaacagcgttctccaattgtgtggtggatcaaatccaggagcgattctatccggaacacctgtcctgtcccgttgacaaggtgcttgacatgcacaattcggtcagctccgaaacgttcgaaaagatggcaccagccttgattggaaaattcccaaacacatatacctacaccaaggcactgggcgagcaggtgatccaggaggaggcgaagggtttgcccgtaggcatctttcgaccagcgatcattttatccacgttcaaagaaccagtgcaaggatgggttgatggcctgcaagggctgatagccatgatatttgccactgcgtacgggtttgttcacttattgctggttaatctgaaagttaatgctcccatagttccggtcgactactgcgtcaacgtggccatcgcctcagctgtccagatagctaagatctcaaagcaaaataaaaatggaccgccgcccatttacgctttcacgcccagcgaatcaaatttggtgacttatgaagatctggctgggctatgctatcaaaatggtctggaggtaccaaatgcgaaaatgatctggtacccgtttacccattgcaccagatgcccctatctgtataacattggtatcttattctatcacatgctgcctggatatttgctagacattgtgctgcgtctgaaaggccaaaagccgatgatgatcaagagttatcacaaggtccacgaggggatgcggagtttgctgcccttctctaggaaaacctttaccatggacatgaaaaataccaacgaaatgtggcagtccatgtcgccggaggagaaggagatgttcaactttgatatgtcaacattgaactggaaggagtattttacgtgtctcatggacggaatacgattgtatttgtttaaggacctccggacgccggattccgttgccgagggaaagcggattttaaaaaggtaa

SEQ ID NO: 42309 - protein, 418 aa, DROSOPHILA
MVVPWKTSSLQVFEVLLNKNPLALEKMTPISGDCCAPDLGISETDRRILAAEVQVLIHGAASVRFEEPLEHAVVINTRAVRLITQLAKEMRLLESFVHVSTAFSNCVVDQIQERFYPEHLSCPVDKVLDMHNSVSSETFEKMAPALIGKFPNTYTYTKALGEQVIQEEAKGLPVGIFRPAIILSTFKEPVQGWVDGLQGLIAMIFATAYGFVHLLLVNLKVNAPIVPVDYCVNVAIASAVQIAKISKQNKNGPPPIYAFTPSESNLVTYEDLAGLCYQNGLEVPNAKMIWYPFTHCTRCPYLYNIGILFYHMLPGYLLDIVLRLKGQKPMMIKSYHKVHEGMRSLLPFSRKTFTMDMKNTNEMWQSMSPEEKEMFNFDMSTLNWKEYFTCLMDGIRLYLFKDLRTPDSVAEGKRILKR

SEQ ID NO: 42310 - DNA, 3019 bp, DROSOPHILA
gtgtcaactgctgttgcatccatcagagcttctctctgggcttacacaagcctaatcgaacacacggccaggtatcatgtatccaacagtgcatgcaaataactctttcaattatttccctgcattatgtagtttgataacaaaataaacaatttatgccattaaagaaaactaggagcttaatcaaacagacctgaagtatacagatatctaagagtatcaattaatttattatgaagtttatactattaatctaagatttaagcttgctttcatcttgtagctgcttcttttgcgtaatgtatatttcttaagcttctgttgagaatgtttgcacctttcaaacatattaattgtttagcctatgatttatgtaaattgttttcaaacttcaatcaatagtgataggtatcaacgatttctcttcgcagtgaagctgtagcattgcacttctagtttaatttgccattttcattgttctgccatctgacgttgatggcggagcagtagtgactattcaggggggcgacggaggagctgacggattggggattggcgtgaagtttgctacacattttccgagccacagcccactccgagtgccggtggccctcgcctcttgaggctgtcaggcaattaaatgcaatttgtctgccatgcaaatgcagctgcagccgaagcggatgaagtggtggccaggggagtgccgacacttgctgtgcagctacgctgccgctgattaatttgacaatctacaagagccataaacaacaatttgagcgtgagagaaatacgaacgaaattcgacgaggaacgtgtgaaaatcagtggcaaagtgttttgagtttagcagctagggttgaacaatccatcagtgatcgtagatgaccatcgatcgcttatcagacgtcataaaatgagactcctaatcgttatcttatcgagctcttaaggaatgcctcagacgaatactactaatttcatttcagttacattaagaatgcagaccggagtacaactagctttgtttttgaccctcacaatagcagcgggtgagtaaggcggtacataaataaatactcaagaacttaaatgcatgaaacattttcagtctacggagagactggatttttcctgaacacacgtcgcgtccaggaaaatgcacagccaatcgaggcggaagtggaggctctggtaaggagctccttctatgccgcagatccaacagtgtgagtcatctgtttacctaagtattgcccaataaataacctttgctattttagcgtaactattccccgctggcttggcaatatctcctcgccggaaatccccgcggtggtttctgcccgacttcagcagcaggacagcaatataatcagtgttgatctatctgaagccaatgatgaaacagagatcatcgacagcgtggccagtttggtgatcgttctacacaatcaattcgatatgccactggatcgcattctggtcgtgggcttcgcggagggcgcccatttggcaggtggggtggctgccaaggtgcagcaggacctgggtcgccagttgtcgcagattacagctcttgatccttcctctggcgcggaactagaccacaagctgtcccaagccgatgctgagtttgtggaggttgtgcacacaaatgccggaggagagggcacttgggagcgactgggtcatgtggactactatcccaacggaggacaaacgcagcctggctgcaccacggactcctgttcgcacgagagagccttcgagctgctcgccgagatgtggtcgccggagaatgactttgtgagcgcccgttgtggttcggtggagactttaagtgcctccagctgccgctggtccacacacaaaatgggccaaaaacaggaggaggagcagcctgcctcaggcatctatttcctggagacccgacagtcctcacccttctcccgtggagcatacttcataagcttcctgtaagctgcggatccaataaaaaagccaaacgaataaaggaaacaaaggagcaactttgtcattagtcattgctgcaatgatggttgaaagaggaggcatacggcgatgagcaagtgccaaaattgatgtgcgtcaggcgctgggctcattcattattttaaaatcaatttaaaaggtcttgccttccaaagttttgacgcacgtccttgtcctcgtccttatctcatttcccttaacggttgcaggagcacagataggcggagttcacaagtttcccctttccatatgccagatgttgtctgaagtgacgatccagtcaacgtatggaaaaggaaaactttatcggcaatcggctcctttgagtgtgcttcaaggatttgcttatatatccgaattgaggcagatttatgccactgaaggagaactcaatggggagtgcgtgagcttcgtgataacttcagataaatcgtattattaaatggtttttattgaaacaaggggaataccatggaaaaaaagaggtttggtcaaaaagaaaattagggcgaatttcttttggttataaatgtaccactagcctttattttgtttttttgctttaatgcatgtgagaagctacctaaaattaattatttccaaagtgaagaatagttatatctacaaatttatgctgtcaggaaagttaattaatttgttttaaaacattttagtaagttagtagccgccacgatagcgtttcgtgacccgtggcccatctccaaaatggtagttgttgcgcatatttccgtgcaatattataggaaaattcctttgtgcgacggcatgccttaacttttttccaaaccgggtggccacccccatattactcctcgaaatgcactcgatagcagtccaaaaagcacccaccgcccagaaaaatcgcaccctggtgtgtgcgtgtcacttgaaagtcgcgctaaaggaaaactgtcacaaattgcatttaaatgcgatgtacttaagtttatctttcggggaatgtgtaccacgaatgttagaa

SEQ ID NO: 42311 - DNA, 906 bp, DROSOPHILA
atgcagaccggagtacaactagctttgtttttgaccctcacaatagcagcggtctacggagagactggatttttcctgaacacacgtcgcgtccaggaaaatgcacagccaatcgaggcggaagtggaggctctggtaaggagctccttctatgccgcagatccaacagtcgtaactattccccgctggcttggcaatatctcctcgccggaaatccccgcggtggtttctgcccgacttcagcagcaggacagcaatataatcagtgttgatctatctgaagccaatgatgaaacagagatcatcgacagcgtggccagtttggtgatcgttctacacaatcaattcgatatgccactggatcgcattctggtcgtgggcttcgcggagggcgcccatttggcaggtggggtggctgccaaggtgcagcaggacctgggtcgccagttgtcgcagattacagctcttgatccttcctctggcgcggaactagaccacaagctgtcccaagccgatgctgagtttgtggaggttgtgcacacaaatgccggaggagagggcacttgggagcgactgggtcatgtggactactatcccaacggaggacaaacgcagcctggctgcaccacggactcctgttcgcacgagagagccttcgagctgctcgccgagatgtggtcgccggagaatgactttgtgagcgcccgttgtggttcggtggagactttaagtgcctccagctgccgctggtccacacacaaaatgggccaaaaacaggaggaggagcagcctgcctcaggcatctatttcctggagacccgacagtcctcacccttctcccgtggagcatacttcataagcttcctgtaagctgcggatccaataaaaaagccaaacgaataaagg

SEQ ID NO: 42312 - protein, 289 aa, DROSOPHILA
MQTGVQLALFLTLTIAAVYGETGFFLNTRRVQENAQPIEAEVEALVRSSFYAADPTVVTIPRWLGNISSPEIPAVVSARLQQQDSNIISVDLSEANDETEIIDSVASLVIVLHNQFDMPLDRILVVGFAEGAHLAGGVAAKVQQDLGRQLSQITALDPSSGAELDHKLSQADAEFVEVVHTNAGGEGTWERLGHVDYYPNGGQTQPGCTTDSCSHERAFELLAEMWSPENDFVSARCGSVETLSASSCRWSTHKMGQKQEEEQPASGIYFLETRQSSPFSRGAYFISFL

SEQ ID NO: 42313 - DNA, 9675 bp, DROSOPHILA
ttggatatttccgtttcctggctgtgcattctccttgtcgtccgcttgcattcctttctccagcgccattaaggtgctgtttccgaagttgaacgactgcgagaatgccattgcgccggtgcgtttttatactgaactaagaattgttgcaaactgcttgttacaagtgaaatgaataaaatgaaaacgaaacgtcgcgcggtcaatgtggccgtcttatgattagtttcaaatatactattcatgtttgtgacactttgaatgaactgtttacaccgccagcggtcccactgaaaccttgttcacactgcacgcgactttcttacaaaatatcttaattaaacagattttatttataccgttactttccgaattccatatgcgtgctatggggcatttagcacaaagctaaggtcccactaaaaccttgttcacactgcacgcgcctttcttacaaaatatcttaattagacagattttatttataccgttactttccgaattccatatgcgtgctatagggcatttagcacaaagctaaggtcccactaaaaccttgttcacactgcacgcgcctttcttacaaaatatcttaattagacagattttatttataccgttactttccgaattccatatgcgtgctatagggcatttagcacaaagctaaggtcccactaaaaccttgttcacactgcacgcgcctttcttacaaaatatcttgattagactgatttcatttatacctttactttcttgctaagtgtaagctaagtgtagttaagtgtaagcctgaaatccaagcccaagaccaaaactgaaagcaaaagacccacagcaaaaactcaaaaaactccacgacgcaacaaactcgcgttcgaatcgcaagcaagctgcgctgaaatcgctaacaagccaaccaaaagccgcacgaaagttgcgcccaagccgcaatgaatttaacgctgactttatgaactttaaaagaaacctttggcttatttttgtttatttctttatttgtatatatccttagaatagtttgtgttgttcaagattacataaaatttgtttacatatctattagatcaatatcccatttacatagttagcattatacaaaatcgcgcgccgcaagctgatgacattccattttagttggtttttttttataatatggttgttggtggatagtgtgtggttgtggttaattagccgcgatacaaatttggatattatgctagacgacaaatgtgcgacattataaaataaataacatggttactgctcgccgcccttgccggatatcttttgatggccactccttttggtttctggggttaggcggaatggatcctcatcatctggccatcatctacatcttataggtggcgggcacggatcggggatagtccagatcgtacatctgggccttgatgaacgccagcttattgaccggctctggacgaacagtggccaatccgtttttgtaggcgtactccacaatcctttcggcaatggccatcgaacagctgacaatggagctgagtggtggatacaagctgcccttggccaggtcgtccttggagaccagctccgccaagcgctcggcggcgaccaagaatacctgctcgggaatgttcagcatgccggcacacagaacacccagtgccacgccagggaaaatgtacgagttgttgccctgacccggatagaacttcttgttgttgtacgtcacaggagcaaaaggcgaaccgctggcgaagatgcagcgccccttggtgtacgtatacgcctcctcggcggtgcactccgccttgctggtcggattggacagtgcaaagatgatcggcgtctcattaatatcggccatcagctcaaggatctcctggttgaaggcgccgccctgcgcagccgctccaatcaggacattgggacgcacctttcgcaccgcctctgccaaagtatcgatgggttcgtgcagctgggcaaagtgcagcttgtgttcggtgagtccgccctttggacgatcgcgggtgatgacaccacggctacatagaaagcatctataagtatcaggatgtattttgattatatatcgacctacctatccaccatccagatgcgggccttggcctcctcctcggtgagaccctccaccttcatggccatcaggcacaggttggcaataccaagagccgcttctccggcgcccaggaacaacagcgtgttatccttcagctgggtcttcttgatctttagcgaggccagcagaccagccacggccaccgacgcggttccttgaatatcgtcgttgaaggtgcagaaggagtcgcggtatttggacaacagcctgaaggcattggcgttggcaaagtcctcgaactggattaggcagttttgaccaaagcgacgaacgcaggcatgcatgaactcatcgatgaactcatcgtacagatctccagtggccctgcgttcgcgcagaccgatgtacaggggatcctccaggatggattcggtattggtgcccacatccaaggtgatgggcaggcactgcgatggcttaatgcccgccaaggccgtatacagggacagtttgcccacgggtatacccattccgttggcgcccagatctcccagtcccaggatgcgctcgccgtccgtgacaacgatggcacgcacatccgtttccggccagttctttagcacgtcgtagatgtgtcccttgtccttgatggatatgaacatgcccttggcgttctggtggatcaaactgtagcgctggcaggccaatcccacggtgggcgtgtacaccagtggcatcatgtaggcgatgtctgagctgagcacgttgtagaacagacgctcgttccgctccgataggctgatcaggtacatgtacttgtccagatcctgatccagtcgcgccagcagagcgcggcagtgctccacctgctcactgggctcacggaccacatagggcagcatgccatggatgcccaactgctggcgctcctcgtgtgtgaaggccaggccctgaaattgaaagggatatgcattttagttaccaatacctactattaatatctgtaggattcgtaataggatggcatgatcgcctcattgaatgattatagaatctcctctcaaatcaaaacaaacaaaatgtaggatggtggaaaagtttgacccgcttatcatggacttgaattcccaggcacgcgcccctattcatatagagtattccacggctactagccaccgagacagaggcagttattaccgatgcttcgcagatccgaggagatagatccctcgacttcacgagtcgggcatcaagttcaaagtcgttttctagcgcccagtcgcttgaaaacatatttgcaatcgcagctttaattaaaacacattttttttcgagggggaagtgaatcagcgctggcctcgattcacacgcacagctaatatgtttagtacgagattttgaaagtttttgctccgtaattgctgcggttattatcgaaatggacaaagcaggcggggattatgttgggggcgttgctgccgacattaaataaaaaaatacgtgcaagttggcattcaaatagaaatcacgctggattatgtggtttttgtttttaaactacggatgtacctgctaatatgcacattagggaataattactcgtgctttgggttacttttccgagtggctgctgttttcaaatcgtgctcattacaaaggttttcttaatgagtctattttaagcttcttgggacatttgatttagcttaataataaatgcacatttttatttccaagcgatatatcaaaatgcaaccaattccaaatctgttgtgtaagttttccgaattatttttgtaaattgaatattttgttagtatgtcaaattaagttattattggaaattatacttgataggttttctatcatttatcatcatttaaaattaatctcgtttgtttcggtcacgcaataataaatttatagtttttcatatgaatttttagttttccgataaaaacaaactattcgtattctagttaattgattcgtaattcgtattctagttaacgtttttgatgcctatcactatgaataagcaatatttaaaataattttggtcagcttgcaaaatatcatatatcatattaagagctgacacagataaataatattgttgtgtttttaaggaattttagctggaaatcgagctgattcccctttttttttttaagtttgcgaagtaaaatacatatgtatttacatacgcatcaaattcaattagctctgaactggctgtttggacaataaacactgaagtgatccccataaacaattgtttactgccagaattgcctcgaacttaaccattatcgtgtggctacgtcatcggtgggctggtgaaatacatccatatgtacatacatacgttaaaaaaagattgagagaacgacaccgttgacattgaaagcgacacacgaccgtcgataagcgtgcgaaagtgttttcgaaccgcctggcaacaagttctccccattctccagcacatatatgtacatacatatatatatgatggattaatattcatgtattcatgcccccagcaattgcctccaaacttgccacatcatgcctaagtcatatgaactaaactatagtttcatcatcctcatcaccttttcaagttctgactttagtttgtattatattagtagttatagcaaatcatgtaagattgcttataaagagggggcaccaaaaatcgaatccagacatgcgtatacgtaatgtgcaactccgatattacgcatacacatttcgcatggtattgcaaaaaggcaaaacgaaacgaaaactgacaaaagtcgcagccacaagcaaaaccaaaccaaaaaatcacaaaaatgagctggttcatatttttttttacactgtctggcgcgaccagttcgatcatcatcatcgcagcggtgatcatcattatagcaatggctaatcattaagtcgactatcaacgaccgtctgtgtctgaactttgaatacggactcggatcggatgacgaaagcgtcgctttaatcagcaacagttgagcagacacacagacaacgggcaatctcagctgattgtttcccttctggcaaaggtgagctgatgaagggtttttttttttctgtaccagcctccctcccagcaggtgaaacgctgctgctcttttgtgggtcatacgatgtggaatgatgacacaggatgaatgcgccactgaatcggagcataatagtttatgatgcacactgcaaaaatgcgcgtaatctttgagtaatttaggttatccaaaaggaaaacataaattccaacctatatatgtaagctatttcaaagcatttcagccattaattgcaattgacaagcacactattatatattattctttctttagttgcccaatataagcaatcgataaatcattgggtaaacaatgaaataatccaactatttcaacaagtttcgagctcgccccgctctttcggcacattgaccgcctgaatttgtttaaatttttaatttcctcagagcgccaataaataacaacaaagagcaggggaatataattctattcgccaactgcatgtggtgtgagcaaaccacacagataaatatttaatgtgtgtatatacatatatagggctgataccaagtgtttttgtggtgattatcgtcattcggttgtttatttctgcggttcgaaacagagttaaatttattgctgaatgtaggtcagttttcgcggactggctttaattttgtttcttatttttttcattggagataggcactcgaaaactttccatgggtaaatcaaaacaaagctcagctgttcggggaaggaggttgagataaacaagagtcacttgttggcagcgtgtaagaagtacataataacaatctgtagtaaacaagtgccagcccctactcgataaggaaacccaagataatttctcgctaaattgttaaattattatttttaagtcttttcgtccgattgtgccgtgacgtaagcgggaaaaaaatccacttggttgtcatggggaaacaccattctggatggccctccattattctcagtggagcttctgtttacaatgccaaatggttggccccttttggtcagtttttttttttagtagctacacgggggaaaataatgtctttactagaaattacgtaatttctttagattcctagcattttaaattgtaatatccgttctaaccattaccacctttacattaaaactctgttttttcagtgcaactgttttaaataaacaaacgcaaagcccatgcgcgctctctcttctctctttcaaaaatgctctctaattttatattttgtgaaacaattcgtgcattagctcattcatgtctgcgtgggaaaaaagcgtagaagccaatgcaagctgaaaaactgcacaagcattgaacttgaaaatgcaatctgagataaatttgtaaacgaaatctgcgtgaccgattcgtgtcaactatttcataccgtacaatttcggcatgtgccacagacagctaattgcctcaattataaaagttggtctatcgattttcttcggctaaggcaccagaaaaaaaatgaaaaaaagcaacaaaaaaaactgacaaaaacaatgagctttggtcttccagagtggcgcgtgtgccatttgccatccctttcactcgctatgtcatctaaaggtcacccacaccacttgccgaaaaatgaagccactgccaaaaagtatctttttttcgctctgaactcagcagctgacgtttccgcctaatagttatttatgtatttatgatttggaatttttttattctcgtgcttgtggtaaaaatagcaggtggcctagaataaattcacactttttcaagaagaaattccaacattggaactcacttctagcgaaatttcacataattaacgattattagtaaatatctttcagatacatatggatggctaaggtaagttctaaggtaaggcttaagttcttcaaattctagaccaattaaacttcttctaatagtctataattatgactctacctctaaatatttacccaaacacggttcactaacacaattcgccgatatggggagcggaaaaaaaaaccgaatgcgaacccacccttaaaaacctttgcctggtatttttccactaagttcacggaactgggcaacttaaaagcgtattcgcatattcctacttgtggaactcacctttgagtagcgcttgtccaagagtcgggtgaatccggagaggctgccgaccacctcattgtcaccagtgccccaaaggcccaggcgatcgcgctgcgcgtatttatctagtttcgaatcgggtttgctcatcttgtcttccaaatttgtttcgctagtggagctgtatgaacgtagttgctgttgttgttgctgttgctggtggtgaagggcgtgcaaactgctctgcagctgattccagtggtgtcgcgaggataacgataacggcagacccttgggcagttccaaatcggtggctaaggctatattacccggattcgaatctctgtccctatgcgtttccgtatccgtatgcggcgatgtgtccacttcggcggcactttgcgttgtgattcgtgtcgttagttttgcgaaattggaaagttcgtattcgagtgtggttgtcgttgtggtcgtatgatttttacacacacgactactacaacagctctgactctctctctcatggctattgttgttgttgctgttgctgtttctcttcgtgtaacagccgagctcgcgctctttgccgcgactatatgaggaaggactctgcgaattgttggcggtgggataaaccggcgtgctgagggagagagagagagcagacaatatgtgaatgaatgtcaatgcgggagtgacaataacaaccaattcgtcaccaacattcggatactctttctgaaagaaccgatgttaacatttttaattgaattttaatcgtacacactccacgttcccacactaacaattgttaataatatatatattacattttaatagtatatatatcttatttgaatagtatattatataacagtatataataatatatgaatttcaccataaaaagctttttgtaatagccaaaaagtcgtagagcaataaaatggtatttagggttaaaagaggcccttaaagggtgggtactcttcgtttcagattccttatcaaggttttcagaacctttgaaatgcgctgatatgtttgaacgtatgtgcatggtcatatgatgaggcgatgcatcgcagacacgccttccagatggaaaccgataagtggtgccaaagtgacactgattattgccaattcagaaacacaccctcttgatctgtggtccaatcgtatgacaccacattatacttgttattctgaaattcttgcattcgactcacggtccaaaagtttttctgataccagaacagcgtcgtaggatcgagtacatggcggtgctcttaaaagtcttctatattatatacttattagtatattgatttgccgacaattatctcactgagtatttgacttttgtctgcgttgctgcagctttcgtgctgaactgaaccgcagtattcgatttgttttgctaccaccatatgtatacactttgcgattttgttttgtttccgcgctctttggctctttctctccgattagtttcagttgtgtggggtatatcagctgactgataagggcggtgcaaacactatctgcacatataaacgccattaaacaacgattattaccatcaaatcatttgtctgggacctggaaaacattgcgatgcggcgtgaatagcatgcgaaaagtttccgtgagaacagcagcggtcgaaataatagtattcaaattagactatagagtattgcagttagcaatttcttatctactattatttataatcagtagctttgattttaatgtaaacttaagtacaacgtgcgtgcattacttgaattaaataaaccgaaccttttctattagagattattagactcgatggcgttaaatataaaccaataatacctcctgaacttgtggcatctgactaagtataaattatttaaagagacgcctcaaggtagaagccccaaaccccaaccttaaccttcagtgtcccgaatcgcttcagttcccgccccactttgcacttgactcactcatacgaccggtgggcccgttccgcttttgctcggatgtctgtttgatatattcaattattacacaaaaattgaaagtaaaacacggcaggcgaataaattggaatatatcacacatgtttgtgtgtgtgcccgagcaaccttcataaatattaacaatttacttcagctttgccaacgaattacattttccaagtaccttcgtgagcaaaacacacctgtcgctctaacttttttttttctttttacttcgaaaatcgttaattaagaaggtggtgctctaattttttatcgatggcgtgtgtcagaagttattcttttttatcgcaacgccgacgagtcgcctgtaaatcgttgataaaacactagtaaaacgaatcattgaccact

SEQ ID NO: 42314 - DNA, 2760 bp, DROSOPHILA
aaagctgcagcaacgcagacaaaagtcaaatactcagtgagataattgtcggcaaatcaatatactaataagtatataatatagaagacttttaagagcaccgccatgtactcgatcctacgacgctgttctggtatcagaaaaacttttggacccacgccggtttatcccaccgccaacaattcgcagagtccttcctcatatagtcgcggcaaagagcgcgagctcggctgttacacgaagagaaacagcaacagcaacaacaacaatagccatgagagagagagtcagagctgttgtagtagtcgtgtgtgtaaaaatcatacgaccacaacgacaaccacactcgaatacgaactttccaatttcgcaaaactaacgacacgaatcacaacgcaaagtgccgccgaagtggacacatcgccgcatacggatacggaaacgcatagggacagagattcgaatccgggtaatatagccttagccaccgatttggaactgcccaagggtctgccgttatcgttatcctcgcgacaccactggaatcagctgcagagcagtttgcacgcccttcaccaccagcaacagcaacaacaacagcaactacgttcatacagctccactagcgaaacaaatttggaagacaagatgagcaaacccgattcgaaactagataaatacgcgcagcgcgatcgcctgggcctttggggcactggtgacaatgaggtggtcggcagcctctccggattcacccgactcttggacaagcgctactcaaagggcctggccttcacacacgaggagcgccagcagttgggcatccatggcatgctgccctatgtggtccgtgagcccagtgagcaggtggagcactgccgcgctctgctggcgcgactggatcaggatctggacaagtacatgtacctgatcagcctatcggagcggaacgagcgtctgttctacaacgtgctcagctcagacatcgcctacatgatgccactggtgtacacgcccaccgtgggattggcctgccagcgctacagtttgatccaccagaacgccaagggcatgttcatatccatcaaggacaagggacacatctacgacgtgctaaagaactggccggaaacggatgtgcgtgccatcgttgtcacggacggcgagcgcatcctgggactgggagatctgggcgccaacggaatgggtatacccgtgggcaaactgtccctgtatacggccttggcgggcattaagccatcgcagtgcctgcccatcaccttggatgtgggcaccaataccgaatccatcctggaggatcccctgtacatcggtctgcgcgaacgcagggccactggagatctgtacgatgagttcatcgatgagttcatgcatgcctgcgttcgtcgctttggtcaaaactgcctaatccagttcgaggactttgccaacgccaatgccttcaggctgttgtccaaataccgcgactccttctgcaccttcaacgacgatattcaaggaaccgcgtcggtggccgtggctggtctgctggcctcgctaaagatcaagaagacccagctgaaggataacacgctgttgttcctgggcgccggagaagcggctcttggtattgccaacctgtgcctgatggccatgaaggtggagggtctcaccgaggaggaggccaaggcccgcatctggatggtggatagccgtggtgtcatcacccgcgatcgtccaaagggcggactcaccgaacacaagctgcactttgcccagctgcacgaacccatcgatactttggcagaggcggtgcgaaaggtgcgtcccaatgtcctgattggagcggctgcgcagggcggcgccttcaaccaggagatccttgagctgatggccgatattaatgagacgccgatcatctttgcactgtccaatccgaccagcaaggcggagtgcaccgccgaggaggcgtatacgtacaccaaggggcgctgcatcttcgccagcggttcgccttttgctcctgtgacgtacaacaacaagaagttctatccgggtcagggcaacaactcgtacattttccctggcgtggcactgggtgttctgtgtgccggcatgctgaacattcccgagcaggtattcttggtcgccgccgagcgcttggcggagctggtctccaaggacgacctggccaagggcagcttgtatccaccactcagctccattgtcagctgttcgatggccattgccgaaaggattgtggagtacgcctacaaaaacggattggccactgttcgtccagagccggtcaataagctggcgttcatcaaggcccagatgtacgatctggactatccccgatccgtgcccgccacctataagatgtagatgatggccagatgatgaggatccattccgcctaaccccagaaaccaaaaggagtggccatcaaaagatatccggcaagggcggcgagcagtaaccatgttatttattttataatgtcgcacatttgtcgtctagcataatatccaaatttgtatcgcggctaattaaccacaaccacacactatccaccaacaaccatattataaaaaaaaaccaactaaaatggaatgtcatcagcttgcggcgcgcgattttgtataatgctaactatgtaaatgggatattgatctaatagatatgtaaacaaattttatgtaatcttgaacaacacaaactattctaaggatatatacaaataaagaaataaacaaaaat

SEQ ID NO: 42315 - protein, 759 aa, DROSOPHILA
MYSILRRCSGIRKTFGPTPVYPTANNSQSPSSYSRGKERELGCYTKRNSNSNNNNSHERESQSCCSSRVCKNHTTTTTTTLEYELSNFAKLTTRITTQSAAEVDTSPHTDTETHRDRDSNPGNIALATDLELPKGLPLSLSSRHHWNQLQSSLHALHHQQQQQQQQLRSYSSTSETNLEDKMSKPDSKLDKYAQRDRLGLWGTGDNEVVGSLSGFTRLLDKRYSKGLAFTHEERQQLGIHGMLPYVVREPSEQVEHCRALLARLDQDLDKYMYLISLSERNERLFYNVLSSDIAYMMPLVYTPTVGLACQRYSLIHQNAKGMFISIKDKGHIYDVLKNWPETDVRAIVVTDGERILGLGDLGANGMGIPVGKLSLYTALAGIKPSQCLPITLDVGTNTESILEDPLYIGLRERRATGDLYDEFIDEFMHACVRRFGQNCLIQFEDFANANAFRLLSKYRDSFCTFNDDIQGTASVAVAGLLASLKIKKTQLKDNTLLFLGAGEAALGIANLCLMAMKVEGLTEEEAKARIWMVDSRGVITRDRPKGGLTEHKLHFAQLHEPIDTLAEAVRKVRPNVLIGAAAQGGAFNQEILELMADINETPIIFALSNPTSKAECTAEEAYTYTKGRCIFASGSPFAPVTYNNKKFYPGQGNNSYIFPGVALGVLCAGMLNIPEQVFLVAAERLAELVSKDDLAKGSLYPPLSSIVSCSMAIAERIVEYAYKNGLATVRPEPVNKLAFIKAQMYDLDYPRSVPATYKM

SEQ ID NO: 42316 - DNA, 8455 bp, DROSOPHILA
agatactatatagatatggaatagacaattttcatatattcgtatttcagttcgtaaaaacccgatttcgatctagtttctcatcattttttataacttcaaagaactctaatttgtcccatccacaatggaaatgtatttttctttctaaatgaaaatattactgagaagggtatgtttggtggaatcgacacaaatcaagtttcgtcatacctatatattgctaaacagaggcttgagcataataaggctaatgatatttttatattataataaccgatgaagaagtccattccctcaaaaattcctccataccgcactcttaacctgcgggcaagcgaccaaattgcacacggaggacaacttcccgaagatatcttgcaatgtcgaggttcacgccaatgccattgccaatctaaaaaaaatcaaacggtcaattgcatgacagggtaatagactaatcttatacagacatacgtgatttgctggaatgtccgcaagtggaatctgtataaatttagatgtaaatggaaatatatatatatgtatgtgtaaatggaaatatatatatgtacatgagaatccaaatccccaacgaagatgtcgtcgttgtccggtggcgggggttggggtgtgaccaggaccaggacacggcggcagtggcagtggagctctaattggcggcgaccacaggatgttatgggtggcgctgtcgtcggtgtcggttttggtgttttgggcacggatttaaaaacgctgtccgccaactcttgaaccatcagctcattacgtctgcgtcaaactggtcggcctctatatacaaaaggcgtaaatttgttacaattgaaattgaattgtcgatgtattaacgttacgcttgatttttaaaaaatctatttgaaacatcgacagctatgccatgtatctatcgataagcaacgtaacgctcgatttttacttattttagcgctaataagattcggaaaaagctccgagagcgcggaggtcggaaaagcgaccgattttcctacggaatcagaagcagtgaaaatccggagcgccgagcacaacgacgacgcacagcggcgggacaaggaaaaactagtcgaggcgcgcactcgtatccgaaaatccaaaaaaaaaaatatataggggagcaagagtcagtggagcgagcggggaaagcgggggaaacgcactcgaaagatacacttttccgacgaaatgtcttcgcggcgtgtgtgtaagaaacattttgattaggcaattaattgagcaaagtgcaagtgcagtgggtggaaatgttttagactccgttcggtggggtgcggcgggttttccggggggcgcatgtgaaaagcgcgtaaagaaaagtaagtggcgcaaatttgtgtattaaaataaatcaaataaccaactaaacgatgcatacacaccgaatccgcatcgactggccgccagtgcaaaatcgtatctgcgaactgagatgccagcgaatctgtgacaaattaattgatattgaaccacttcgcagaccgctgcgacaaaatgtcgaactagccgattcaaaaaacatatagattctgtgtatataggggaatttatttttagcgattttttaagccccctcccgccccgcatcggaattcaaatcggtcgcgaaagaccaatgctctgtgtatggtgaatcgaacgatcgcaaacataatccgtatcgaataaagtagattccaaaccaagagcatccatcacccatcatccatcccatccgtcgatggcatcgaaaacggggggctcgcgcgtcaacaattttcaagcgtgtacacaaaaatccagccaagcgcattgcccgcaataaatccgagacgagacccagacccagacccagcgaacccaccatatagaccatccaccgcccagcaccacccacttgggccagttcactcgaccacttgattaacgccaatgccaattcaacgcagaaattctctacaaaagttctcgcagagagcatgcgttcgcctcgcgaaagcttttctctttgctctctgctctcagcccctgcccctttctttccacccccgactagccccatctcgcttgcacaggatgtgctccgtgtccccagtcactttgtttttgtcattgacctgttgtggaaatctatacgtgtatatacgacagttatcaactaaactattcaagcccgagtgcggaaaattataaagattaagtgatctgcggaaccacataggaaaaatccttgcaagagaacatccttcaaatgaaaacgaatatccgttagtgcttgtgtgtttttaagagagtgagaaatcctgcaacagctgggtgttttcttaattaatattgtgcaaatattgcacccattagcaagttaatatcccatatttggttattattatatacatacattatatacttactgaaacagttaaacaaacagttaaacaaataaagtttatgccacacaaggatgacaggatgaatcctcgagtgctttctaatcgatatgggtgtgagataccgtgagcagctttaaagttcccagatccttggaaagaaccacttttagctggataaataaaacgggtttcagtaccaagaaaatcaaaaaatagttcaatgaaacgcattctatatcattctatataaggatataacagatgtttaaatgtcttttgttatatttaataactaaacggattttcatctactatccattgcaggacatcaatcagtcaattgtaatttaaagagtagggacttgaacgaccgccatgggcaacgtgtgcagttccggccagaagaaaaagaaggacaaggacagtgcctccgaaaagtcagacgagtaggttcatccgttcgtgcatcgattctctggattgtactaatgttgtggttgcagctcgcctccctaccaggaggcggatcagaaggacaccctgatctccgccgactcgagtgctggtgatggaaagcgggcacctttggccgccgtggaggcacttccggaggtgacaccgctgccggagtccaatggcaaccaggcgcaggtccagaagcagctgtcaacgggaccggggagcaagccaggtggagcagagaagggtaatggagatttaaaaccagtttattacaatacaaacaattgggtttcctcaagctccgatcaaaatgagcataagagggcatccctcccggctccaaaatagattaatgaaatttaattacgaactaaacgatctttatccacctacagattcaaacagcaccactccgcagggggcgcaggcgcccagtgatgtggccaatgccaatcccggtgccggaaacctgagcgtgctgcagggcaagccgccgcccggccgcaagattgagcgggacaagaagatcgtggtctacattctggcggacaacagcaccgagtacaagaagcacaagcgggtcgtgcacagcctgtacaagcatttcaagagcaagtgccaaagccgcggctttgacttcatcatcgccgatgtgcacgacagcgagccggagacggaaccgggcaatggcaatgcccggaaggatttctcccgcctgcaggaggcgaagcgctggacccaaacgcctctggaggcgcagggtggtcacgaggaagcggccaactgcctgtgcgagatcacgcgccactcggccggagcgtacatgatccccgttctgttcttgggcgccaccctgggcactccgatgctcccgctgaccatcgagagccaggacttcacctcggtgctgggcaccgctagcgaggaagagcgtttgctcctggagaaatggtacaccattgacaactcgtaccagccgatgtgccaccgtctgcatgcccaacaggtggatccctactccagtcaggtgaacggagagctcaacgagctgctggccgtccttttgcgtctcttctccgacgacgtcaaggactcgtatctgaccaccgtggtggagcaggagatcaataacacggtgctgatgagccaggagctggccaagcgatgtatctggatccagacgggcagccaggtggcccggccatcggagaatgctagccccttggagctggaggtgcagcggaggctcagtcatgtgtactccggtctcaagagccagttgagcgagaaaaacctcatccgtctgctgcccacgatgagcatcctggacgaggagttgtcggcggtgatcgagagtctgctggacaagacgctggccggcatcttcgaggagcaccagcagaagaacagcatcccctacaatacgctgggcgtggaccgggtgctgctcgaggagcttcgcctggtgggccactactccaagctcctggcacagaactcggccaacttcgacatcatgaacgacgtgaagcgctacattcgcgacagcaccgcccaaccgctagtcgtgtccggggcacggggaagtggcaagagtgtcctggtctccaagatcatggagaatgtccaccgctggaagccggaggcacagctcatactgaggtgggatatgacataatataagctttcaatcgcgagtactcattaaccatttgttttccctttagatacgccaatctcagtgcccgctcatcggatctcacctcattgctaggctcaatggccaaccagatgtcggtcctggagacgggacatcagtgccaagtgccacacgtaaggaagtgttattaaaacatatagcgctgatattaatgcagtctttccaaatagacactagagggttattctcgagtgattcgagagatccttgaccggcagcagcgcttcttcgtgctgatcatcgacggtgtggacgaactgcagcgggatgagctgctcgactggctcccccagcagttgggcagcgccaaaatgatcctcaccgtcagcgagctggcggatgagggggaggacgtggacgggacggaggctggggactcctttgatatgctagccgcgctggcgcagttgggcataccacagcggtgcttcctacgactgcgacaattcacggaacgccagtggcacgacatcctcagctcgggcggcggtgacttctacgcggccaatggggcgttgaagttgcccgacgactggaagacactgcacgggaagacgccctaccacgccaagtccttgtggtggctggcctggctggggcatgtggctcagccgatcagcgagatcggcgacatctccagccggatacttcaggtcctggaatccaagttcgccaccgatcaggtggaactgctgctgctgatcgtccgcctctcgccgtggggcatccgggagagcgactgcctgggcgtgttccagaagatgacccagctggaggcgcaggtcgccttcaaggtctggtccaagttctgctggctgatgggaccaatgctattaggtcttaagaatattaggatagcggacaagagctttggacgagcggtcctggcgaggtacgcgcagaagcagtggctggtacatgaagcgctgcgggactacttcgaccggcaggacagcgagttcaagggtagccagggtgccaacacgtgagtgttcctttcttcccatcctgcaattgcaatcatttcaaatgcattccttgacagctacaattaccaaaagtacttaaaactgccttatcatcatttctgtgccgtgatcgaggacaatccggcgcctcacaagatcgacatactcttcaactgcttttactttacggacctccagtggatcgccaataaggtgcacgccacgggaccggagcacctgctgaacgacatcctgcaggcggagtggctggccaagtccggcggcgagaactgccccaccgcttacgtgcacatctgtttcctgaagcaattcctcgagcagtatctccacgagctgagctacgatggtcagcagttctacacgctgatgaagtactatctcaagacgcgcttcagggaggcacccgagctcaaggacgacgagaagatacgctcgtggtgggagtacaccaatgagctcgagtttgccttcctcgagattctaaacgcggacttggacgcggagaacggcaatcaggcggagcaggagaagccgtcggatgacgcagtcccatcctcggttcccgttaagggctacgatgtcctgatgaacctgccccagcccggatgctatgtggcttcgatgtgcacggaccgatctgagatctgcatatgggacgtgaagaattgctgtcgaatccgggagctacagggcatccagcagcctacggcgatgtgtcccgtgggtaactatgaggcagcagtcctttgtcgccgcgagatccgcgtcatcaatctggacgagggaaagtttaaggtgagtggtcccaatatcttatcccagatcttatataaattttggattccttgtgccattccaggtcactctcaaaggcgtaatgaaccagaaaatgccgtatttcggtctgcacgatcagaatcacttggtttgtctctcgcgcaaccggatgtatgtgaatctgatgaatctggagtcgggcgattgtgtgaccaccttcaaggcgggtgaagatcgtttcctcaattccctgttggtctctggagatggaaggtaacaggttgaccggctttgtactgaagtagtagttgctaattctggtttgctctctagaatcttggtgtgcggtgatgagacccagaagcctttcccactgctagtttggcacctttcgcagcgaaagctgctctatgacctccgaattccgcaccacgacttcatcacctccctctccgcgatcacccacgagggttcctacgtttgcgtggtggccaaagagctgaacgagccgacgacgcccaacttcattgtggtatacgacttacagagcggcactctgtttaagaaatggaagcccgcctgcaacacagtttccctggccatctcccaggtgaacgcttgcgtcatcgccggcctagaagatgccaaaatcctaatctgggacctggtcacgggcaactgcaagagcaccttgatcggccacaatgcaccggtaacgttcttgaagctggatccattgggaaaggtgctgctctcctacgacaaggagggacgtgattcggccgtccgtatgtgggagttgaattcgggtatgtaccacggtcttcgccctactgaactgtatagtcatccttctggtcttgcagccaaatccctggccgtgtttaagccaccggcgcaagtgagcacttgtgagattctgccgaacggagccttcgtggtgctggctctcaaggatcgcaactccttgctgaccctggctttgaagaactacggcggaggatcgggcgccctcgacgatgactgtggcactctttacggcaatccagacaaccagcacaaagttttcgacttgagtaattaaatcaattaacgctagttatcattattcaaattataaatgaagcataacagggtgctagaccgaggaaggcagaactctgaattattataaatatggcaaacaaatttctcatgcataattcattagatgtatgtaaaattctttgagcaaatcttaccaaatgtacaaagcaaagaaaatccaaagaacattaaaaatttaaaaatctacccagctaatggtggttttctctttatgtggtcgcaaacagatacaaaaggttcttggcaaactgaataatctcggtcccgccgagcttggaggtgccataaatacggtccacgaaggtgatgggcacctcggcgatggtgtagccgtgctgtctagcccgaacgagcatctccatttggaacacgtagcctttggacacgcagctggcaatgcatttctccagtacatccttcttgtagagcctgaaggagccggtcaaatcactggcgttcggacgtaaaagcacctgggacaaaaagttggcgccgcgcgagatgagcttgcgcttgaagtcccagccaaagacacctccatttccggcataccgagtgccggatacaatgtcatagttgccctcctgttgcagcttaatgaactcgggaatgaatttgggctgaagcggaaaaaatatagcttattagtttatcttattattagtttaaccctgttatctagactcacatgatgactcaagtccgcatcgatgataactataaagtcgccggtggcatgtttgatgccatgtatgtaggccgttccgagtcccaatttggagccacgtggtctcagcacaatcttgtcctccccgtagatcttctgcaggtctttggccacgtctagtgttccatccggactaccatcatcaatcacaatcacctcgtattccaagccgctgcaaagggggagcaattaatacctgaatttgcaccttagagcagccgctactcacctcgccttcatgtatttcaca

SEQ ID NO: 42317 - DNA, 4567 bp, DROSOPHILA
cggaggtcggaaaagcgaccgattttcctacggaatcagaagcagtgaaaatccggagcgccgagcacaacgacgacgcacagcggcgggacaaggaaaaactagtcgaggcgcgcactcgtatccgaaaatccaaaaaaaaaaatatataggggagcaagagtcagtggagcgagcggggaaagcgggggaaacgcactcgaaagatacacttttccgacgaaatgtcttcgcggcgtgtgtgtaagaaacattttgattaggcaattaattgagcaaagtgcaagtgcagtgggtggaaatgttttagactccgttcggtggggtgcggcgggttttccggggggcgcatgtgaaaagcgcgtaaagaaaagacatcaatcagtcaattgtaatttaaagagtagggacttgaacgaccgccatgggcaacgtgtgcagttccggccagaagaaaaagaaggacaaggacagtgcctccgaaaagtcagacgactcgcctccctaccaggaggcggatcagaaggacaccctgatctccgccgactcgagtgctggtgatggaaagcgggcacctttggccgccgtggaggcacttccggaggtgacaccgctgccggagtccaatggcaaccaggcgcaggtccagaagcagctgtcaacgggaccggggagcaagccaggtggagcagagaaggattcaaacagcaccactccgcagggggcgcaggcgcccagtgatgtggccaatgccaatcccggtgccggaaacctgagcgtgctgcagggcaagccgccgcccggccgcaagattgagcgggacaagaagatcgtggtctacattctggcggacaacagcaccgagtacaagaagcacaagcgggtcgtgcacagcctgtacaagcatttcaagagcaagtgccaaagccgcggctttgacttcatcatcgccgatgtgcacgacagcgagccggagacggaaccgggcaatggcaatgcccggaaggatttctcccgcctgcaggaggcgaagcgctggacccaaacgcctctggaggcgcagggtggtcacgaggaagcggccaactgcctgtgcgagatcacgcgccactcggccggagcgtacatgatccccgttctgttcttgggcgccaccctgggcactccgatgctcccgctgaccatcgagagccaggacttcacctcggtgctgggcaccgctagcgaggaagagcgtttgctcctggagaaatggtacaccattgacaactcgtaccagccgatgtgccaccgtctgcatgcccaacaggtggatccctactccagtcaggtgaacggagagctcaacgagctgctggccgtccttttgcgtctcttctccgacgacgtcaaggactcgtatctgaccaccgtggtggagcaggagatcaataacacggtgctgatgagccaggagctggccaagcgatgtatctggatccagacgggcagccaggtggcccggccatcggagaatgctagccccttggagctggaggtgcagcggaggctcagtcatgtgtactccggtctcaagagccagttgagcgagaaaaacctcatccgtctgctgcccacgatgagcatcctggacgaggagttgtcggcggtgatcgagagtctgctggacaagacgctggccggcatcttcgaggagcaccagcagaagaacagcatcccctacaatacgctgggcgtggaccgggtgctgctcgaggagcttcgcctggtgggccactactccaagctcctggcacagaactcggccaacttcgacatcatgaacgacgtgaagcgctacattcgcgacagcaccgcccaaccgctagtcgtgtccggggcacggggaagtggcaagagtgtcctggtctccaagatcatggagaatgtccaccgctggaagccggaggcacagctcatactgagatacgccaatctcagtgcccgctcatcggatctcacctcattgctaggctcaatggccaaccagatgtcggtcctggagacgggacatcagtgccaagtgccacacacactagagggttattctcgagtgattcgagagatccttgaccggcagcagcgcttcttcgtgctgatcatcgacggtgtggacgaactgcagcgggatgagctgctcgactggctcccccagcagttgggcagcgccaaaatgatcctcaccgtcagcgagctggcggatgagggggaggacgtggacgggacggaggctggggactcctttgatatgctagccgcgctggcgcagttgggcataccacagcggtgcttcctacgactgcgacaattcacggaacgccagtggcacgacatcctcagctcgggcggcggtgacttctacgcggccaatggggcgttgaagttgcccgacgactggaagacactgcacgggaagacgccctaccacgccaagtccttgtggtggctggcctggctggggcatgtggctcagccgatcagcgagatcggcgacatctccagccggatacttcaggtcctggaatccaagttcgccaccgatcaggtggaactgctgctgctgatcgtccgcctctcgccgtggggcatccgggagagcgactgcctgggcgtgttccagaagatgacccagctggaggcgcaggtcgccttcaaggtctggtccaagttctgctggctgatgggaccaatgctattaggtcttaagaatattaggatagcggacaagagctttggacgagcggtcctggcgaggtacgcgcagaagcagtggctggtacatgaagcgctgcgggactacttcgaccggcaggacagcgagttcaagggtagccagggtgccaacacctacaattaccaaaagtacttaaaactgccttatcatcatttctgtgccgtgatcgaggacaatccggcgcctcacaagatcgacatactcttcaactgcttttactttacggacctccagtggatcgccaataaggtgcacgccacgggaccggagcacctgctgaacgacatcctgcaggcggagtggctggccaagtccggcggcgagaactgccccaccgcttacgtgcacatctgtttcctgaagcaattcctcgagcagtatctccacgagctgagctacgatggtcagcagttctacacgctgatgaagtactatctcaagacgcgcttcagggaggcacccgagctcaaggacgacgagaagatacgctcgtggtgggagtacaccaatgagctcgagtttgccttcctcgagattctaaacgcggacttggacgcggagaacggcaatcaggcggagcaggagaagccgtcggatgacgcagtcccatcctcggttcccgttaagggctacgatgtcctgatgaacctgccccagcccggatgctatgtggcttcgatgtgcacggaccgatctgagatctgcatatgggacgtgaagaattgctgtcgaatccgggagctacagggcatccagcagcctacggcgatgtgtcccgtgggtaactatgaggcagcagtcctttgtcgccgcgagatccgcgtcatcaatctggacgagggaaagtttaaggtcactctcaaaggcgtaatgaaccagaaaatgccgtatttcggtctgcacgatcagaatcacttggtttgtctctcgcgcaaccggatgtatgtgaatctgatgaatctggagtcgggcgattgtgtgaccaccttcaaggcgggtgaagatcgtttcctcaattccctgttggtctctggagatggaagaatcttggtgtgcggtgatgagacccagaagcctttcccactgctagtttggcacctttcgcagcgaaagctgctctatgacctccgaattccgcaccacgacttcatcacctccctctccgcgatcacccacgagggttcctacgtttgcgtggtggccaaagagctgaacgagccgacgacgcccaacttcattgtggtatacgacttacagagcggcactctgtttaagaaatggaagcccgcctgcaacacagtttccctggccatctcccaggtgaacgcttgcgtcatcgccggcctagaagatgccaaaatcctaatctgggacctggtcacgggcaactgcaagagcaccttgatcggccacaatgcaccggtaacgttcttgaagctggatccattgggaaaggtgctgctctcctacgacaaggagggacgtgattcggccgtccgtatgtgggagttgaattcgggtatgtaccacggtcttcgccctactgaactgtatagtcatccttctggtcttgcagccaaatccctggccgtgtttaagccaccggcgcaagtgagcacttgtgagattctgccgaacggagccttcgtggtgctggctctcaaggatcgcaactccttgctgaccctggctttgaagaactacggcggaggatcgggcgccctcgacgatgactgtggcactctttacggcaatccagacaaccagcacaaagttttcgacttgagtaattaa

SEQ ID NO: 42318 - protein, 1380 aa, DROSOPHILA
MGNVCSSGQKKKKDKDSASEKSDDSPPYQEADQKDTLISADSSAGDGKRAPLAAVEALPEVTPLPESNGNQAQVQKQLSTGPGSKPGGAEKDSNSTTPQGAQAPSDVANANPGAGNLSVLQGKPPPGRKIERDKKIVVYILADNSTEYKKHKRVVHSLYKHFKSKCQSRGFDFIIADVHDSEPETEPGNGNARKDFSRLQEAKRWTQTPLEAQGGHEEAANCLCEITRHSAGAYMIPVLFLGATLGTPMLPLTIESQDFTSVLGTASEEERLLLEKWYTIDNSYQPMCHRLHAQQVDPYSSQVNGELNELLAVLLRLFSDDVKDSYLTTVVEQEINNTVLMSQELAKRCIWIQTGSQVARPSENASPLELEVQRRLSHVYSGLKSQLSEKNLIRLLPTMSILDEELSAVIESLLDKTLAGIFEEHQQKNSIPYNTLGVDRVLLEELRLVGHYSKLLAQNSANFDIMNDVKRYIRDSTAQPLVVSGARGSGKSVLVSKIMENVHRWKPEAQLILRYANLSARSSDLTSLLGSMANQMSVLETGHQCQVPHTLEGYSRVIREILDRQQRFFVLIIDGVDELQRDELLDWLPQQLGSAKMILTVSELADEGEDVDGTEAGDSFDMLAALAQLGIPQRCFLRLRQFTERQWHDILSSGGGDFYAANGALKLPDDWKTLHGKTPYHAKSLWWLAWLGHVAQPISEIGDISSRILQVLESKFATDQVELLLLIVRLSPWGIRESDCLGVFQKMTQLEAQVAFKVWSKFCWLMGPMLLGLKNIRIADKSFGRAVLARYAQKQWLVHEALRDYFDRQDSEFKGSQGANTYNYQKYLKLPYHHFCAVIEDNPAPHKIDILFNCFYFTDLQWIANKVHATGPEHLLNDILQAEWLAKSGGENCPTAYVHICFLKQFLEQYLHELSYDGQQFYTLMKYYLKTRFREAPELKDDEKIRSWWEYTNELEFAFLEILNADLDAENGNQAEQEKPSDDAVPSSVPVKGYDVLMNLPQPGCYVASMCTDRSEICIWDVKNCCRIRELQGIQQPTAMCPVGNYEAAVLCRREIRVINLDEGKFKVTLKGVMNQKMPYFGLHDQNHLVCLSRNRMYVNLMNLESGDCVTTFKAGEDRFLNSLLVSGDGRILVCGDETQKPFPLLVWHLSQRKLLYDLRIPHHDFITSLSAITHEGSYVCVVAKELNEPTTPNFIVVYDLQSGTLFKKWKPACNTVSLAISQVNACVIAGLEDAKILIWDLVTGNCKSTLIGHNAPVTFLKLDPLGKVLLSYDKEGRDSAVRMWELNSGMYHGLRPTELYSHPSGLAAKSLAVFKPPAQVSTCEILPNGAFVVLALKDRNSLLTLALKNYGGGSGALDDDCGTLYGNPDNQHKVFDLSN

SEQ ID NO: 42319 - DNA, 3938 bp, DROSOPHILA
agtctggctcccgctcgttctttgtaccagtgcgtaatttcaacattggcaattaaaattttgtatgagttgcttgcaatcagtgcccaaacttgccacgcacaaacaaatacactcgcagaaacacccacacggatgcccgcacacagttgcatgtggcgacaaactcagctggtgtctgcataatttaaagcatacatttaggctgccggtcctggctgtgtgataaatgccaaccagtcagcgcacactctcacaaacatacccatcacccaacctcacccatacacccaaacaccgatgcggaggacatcagttcgctgctgctgacaattccaaacaatttgccgagtctggcaagcattttgggcttggttccctgttcggggctgtgattgccgtcttcggcgctctgctttgattataagccacgcccacacagaggcatgcgtggacacactcagaaaaaatgatcgatcaaacactagatgaggccctcttgccaaattactagggacttacgagcaattaaaggtggtttgaattatgccagataaatgcatatgcaacaaaatacatatttctatttttatatcattcttatgtttaactcatacttctcggtgtatccacccagccgggctttaaatccatgtaaactacgaacaaatgtttagagaaaacttgttacttgttattctgcatatttgacaaacacttcgcatgctcacagctaacgaatgttaagttctggaaaccttaaatccattgaagcccaaaactccgtcaagtatttcaaattcgaattatgagcagatatacttcatttctttgcaattggaactttgcccatatggagtttaaattgagatttatttaattgcaaccagacgttttatttattttctgtatatagtgtataaataggacatgagcaggactaaattcgaggcaagtaaagtgattgagattaaaatgttcagtgagatttgcgcactagttacatgacgtaggcacgtcgcatcatcagatcaaaaaacatatcgttgtcaattgaggcactaatggtggcataatagttgacaaactcctcgcgggttatctgtggtacatgatatttttaagttgtttgtaggcagaaaatgtcataaggactcacctttccatccaggtttcctcgacctccctcaaagttgtgcaaaaagtcggtaagaatttcatcctcagacttttctccagactggtacttgggatgttcttttacagagtacacgttcttaagatcttgaatggtaattactccatcttcatcacgatccattttgttgaacgcctgatcaataatattcaaacgactctgcggcatggggggctaagtatgggaaaataatatatttcaatggaatggaatagtttatagcttatgaatggtatgtacaaaataagatgtattgtgcatcttacccttagtttaagcaggaactcggtcatattaatcgatccactgccatcctcatcaaacctaaaaagggaaatttaatatttctcctattgttaatgaaactgccgtcactcacgtggcgaacatctgcttgatctcctcctccgacacatccaatccggtgtccctaatgccagtgatgaactcctcctcattcagagccttgctaccatcgtcgtccatcgcccggaaggccctgccatgaataatcgaaagttaaactgttactattgcataattcagcgcaggtccgattgaaatgtcgttaaaaggcaataagccaatcatacctgcccaatcccagtatgcctgttgctccgcggctgaggcacagcaatcgcagcttggtaatgggatccttgtcctcgccatctgtcagttcccggagcgcttgactcgccatgttggcctccagggtgtagaggtcacagttcgggttcttagatttaggcatttttagaatttataaatacgtttacgtttaatttaatgtgaaatagttgtcaaaaatttttgacattgctacacaaaatgtgtatcgattgatttcgattttagtaagcttgacccgcttctctttaactttgatgtgggcgtataataatggaaaattaaccgtgagtaatatgtggtccacagtaccgatatatgagtaagaattagcaatattcaatggaaaacaattcaagtacattctacaaaattacaaaaaaaagattttcctgtcttattctgcatgtatgtattgcatttgagtatacatattgcgaccttatcttttaattcctttatctgccttaatatcaaaataatgttagagttcatttttatgtcaaccaaagcaaataaactacagcgaatcaaaaccagagtattcaatttcattcctatatctcttatggctattccccgtaatgtaattatagcgaaaacgctaaaaaaagtgactaacaaaaatatccatttatggatcaagtaattaaagctactgcgcaaacacaaacaatataaaaacaaaagatcccttgaaccgcagtgaatcattcgcttcgcctctgctgatttttctcaagacgctctctaagtgtttgtttcgtcacacttttaaagagacttgccttcaattaagtgaaattcgtcactaggcaaggggagttaataatcagctggagaggtgtaacgaaagtggggtggatttttaatttcggagaaagccctttcgcaatttcccaaattggaacccaaggtgaaggtcgccgaccaaaagtttggccccacaaatagaaaacaaatgcgggaataaacaagccaagcacaacgtacctccatgttttttattcgtgaatagaccttttcactagttttatacaaaatttgatgggggcttgttttttttataggcgcccaactgaatggataactgcaagatacttgttactttggcggctttgaaatgcaaactgaaagcgaaaaataaagcggtcgcaatgaataaacagccagtcgctcgagaagagcgagatggccagatacgaaggttcgagacagaacgagaggcactcacccagatggggagcaccgtggaacgagtggaaatgaaatatgagctttgccggcttttgtggcgggggaaaactagttactaaaaagcatttacgctcatgtagagcagacagttcgtcccagacagaaaacccactggactgccagctcacctgactcatccgcctaataactcggtcgcatttgccagtgatggcagctttattttaaaataaaataagatacatactgttagaaaataagataatataaaatgaatttaatcaaatatattgacccatataaattagattttacccaaacatttgacaataaacttctcatgaccaaaccatgtttatatataaatctgttctccacgaacaagcgaaatttattagataacaatacatttctgtaagctaagatattttctatgcctaaaaaaacttcgagtgcctacaactttgttagatagaaatggacaactctgatagtggaatatacccggtcttctaaacattttatttcaattaaaaagtggcgggttcctacacaccaatttcgtgacttcactggccaaatgtttactttcggccaacacgagccgacagaaaacaaatattcaaactcagtgattgtggcctgtaaaattgatctagataaaaaaacgaaagcacctgaaagtatgcaattcaaagtgcccacgagtttgccatttatttggttggatttaattgaagttgcagggcaaccaacaacagaaagttcaaagttaaacaagcgttggtttcgattaaactcattcataaagatcaggaaataaaaatgatgttgtctctttaagttaatactgcacttggcctttgattcgcagaatttaaaatatgtaaat

SEQ ID NO: 42320 - DNA, 756 bp, DROSOPHILA
taacaagtatcttgcagttatccattcagttgggcgcctataaaaaaaacaagcccccatcaaattttgtataaaactagtgaaaaggtctattcacgaataaaaaacatggagaacccgaactgtgacctctacaccctggaggccaacatggcgagtcaagcgctccgggaactgacagatggcgaggacaaggatcccattaccaagctgcgattgctgtgcctcagccgcggagcaacaggcatactgggattgggcagggccttccgggcgatggacgacgatggtagcaaggctctgaatgaggaggagttcatcactggcattagggacaccggattggatgtgtcggaggaggagatcaagcagatgttcgccacgtttgatgaggatggcagtggatcgattaatatgaccgagttcctgcttaaactaaggccccccatgccgcagagtcgtttgaatattattgatcaggcgttcaacaaaatggatcgtgatgaagatggagtaattaccattcaagatcttaagaacgtgtactctgtaaaagaacatcccaagtaccagtctggagaaaagtctgaggatgaaattcttaccgactttttgcacaactttgagggaggtcgaggaaacctggatggaaagataacccgcgaggagtttgtcaactattatgccaccattagtgcctcaattgacaacgatatgttttttgatctgatgatgcgacgtgcctacgtcatgtaa

SEQ ID NO: 42321 - protein, 201 aa, DROSOPHILA
MASQALRELTDGEDKDPITKLRLLCLSRGATGILGLGRAFRAMDDDGSKALNEEEFITGIRDTGLDVSEEEIKQMFATFDEDGSGSINMTEFLLKLRPPMPQSRLNIIDQAFNKMDRDEDGVITIQDLKNVYSVKEHPKYQSGEKSEDEILTDFLHNFEGGRGNLDGKITREEFVNYYATISASIDNDMFFDLMMRRAYVM

SEQ ID NO: 42322 - DNA, 3527 bp, DROSOPHILA
cattctcgtttctcaccgataaaatcgcattttattccattatctctctttttatgtgttcacttattttttatggtgtttcatatgtgttattttttttaataatttacccaatacacttggcgtggggtgtgcagggatatatttgctcgaaaaattgttcatgtgcactacgtatggaaatcaattgccaaacaacaatcggaaaaattactcttatatacagatattggaaattcgtttggtttgctggagagtgacttatttttgctagtatcagtgtcaggcaggtaaatcaatttttttggcagtttttgtttgttttaattttcagttttgttatattcagtcgttgtgacccaaccgacgattatattcattttcatggataacatgactttcattaaaaagtaatatagtttctcacataaaaagtacttgtaacatgccgaattaccaaaaagcaatgtttgaacacaaattataaaggaaaatttcactaaactcctgtaagtaacaaaatatagtcaaatgaaaaaatgtatataaaatgtttttaaactaaaaagtatgaaataaattttttatatcatactttttaaaacccattacataaaactaagtagcgtcctttcatttctttgttatgttttatttgaactttgttcataaaaacgttttcatacgaaataatttaaagaatatacttaattattaattaaaaacatttatatgtttaatatctttccttgagcaatcataacctttaacgtttcactccatcaattttatttacatttatcgacccaaaagctttcctattcgctaattcgcggtcttacctttgtctgttaccctaactaactaactaggtgactaactgactgactaactaacgtgatgatatagttgacaaagttgccatacgaggcgatttggaatccgagtccgaagatttaagttcgtccaccgattccgattctcttatggatgagagtgttcatgaagggcgtcgcaaacagtgaattagtagaattgccgccaggaatgcggaaattagtgacgtcctgccgcacaggatgctcctttgtgccgagccagagtctttaattaaggaaacgaagagatgacataggaaaataaaccaaaagaaatattacggcataagttcaataaaattgcaggcctaaactgcaaggtaaaaactttcaatctcaaatggccatttataggtaaataataaattcaatttaattgtctaatttagttaactgccaatggatatagtttcaatttgatcgaaataacgaaaagattgataatcaaaattgataattcaatttgatcgaaataacgaaaagattgataatcaaaagcaactcacttgcattcgcatgcctcagaggcatttgattgttgaaattgtcgtactgcgatagcgacgcactgagcgtcttctcgcgcctcagctccggataattttcaatttccgcaacgcatttgagctccaggattttcccggcctggaaaaagcgctgcccctgcaaaaagaattgcacctgaagccgctgtcgcctcagtacataatcatgggccgccaaacttgtgtccgttgtgggatacagttcgcctaagagcggctgcaaagagtgcaaaatttaattgaattagttaaatacaaactttataacgataaacattatcatagccttttggttataactatattattatggctcttatttagtgaatggaacaaacctgctcgccattgatgtaccaggtgagtcgagtgggcaggctggaaaaatccgatatgcaggtggctttaaggtattcctccatgcgatacatcgagttgaagctctcgattagcgggtcgttctgaggcagtgctaaaatattaaaataaaaaattatttactgaaatagatgaccaaactattatggaaagctcacctgcaacagtcatgttgtcggccttgtccgccagcttaaaatggggcgcatcgccgctaacttcgcacttatagagtcctgtggacttggcaccttgtaaactcaaatccagtcgacagctcgattcgttgcacacgtatttcccctccagcacttgcagaccagccacatcgaaagtcatgtaaatcggactcgtcaagggggaatatctaatcaggatattgagtcattgagtatttattttttagtagaactagcagtggttacctgaaaaactcctcgtgatctttgtaccatttgaccgagtttagcgtgtgacctcgcatatcgtagctgcaagataaggtcacattgtcccgaaaatctacgatctcgggcacactgatatccgtcacaaacagagcatatgcgattgggtagtctagaacacataaagaaaagtgttacaaatgtgtatagatccaatattctattgaaattttgcattcctttttaaagcttttgatcattttgagatgttgttttccccaaagaactcgatgatcaacatataccatatttgttgtacgaaccgtagggcgtggcacatatgtatgctttaagtatggaatgacttcgtatccccgaaatgctggatagcaaagcccacaggccaatggcaaaattttgttgaccaaaatccagggacatgttcagcggtaggtgtagtatgcgtaatttttaatttgcccaggtgactgacctgggaaaatgggaaaaggtgggggaacacggctggtgctttgtgtccaagttctgtcacatgagacatcgaataaatttcaaatttcttgaaatgaatatgcaaaacagttagttgggcagacgactacctacgtaagagcaagaaaaaaagcaatggatgtggagccatatgtatctgccatatggtagtaggtagattctgacatggctgaccaccaacccaataaacaagcagtgggtggctggtccagcaactgataagaaatgcggacaaaccaaatgtcaaatgactcgacttttgcccccacaaaaataaatttaacatgagccgatatgagcgtataagaaggagtgcaaagtaaaagtaattttgcaacaggacatgacagatattcagcagttggaaatcacttatttggacgatgcttaacttctgtagggatcttatatttgtaattaaaaatctgttttataagctgaaataggtgtacaaatattaggcgattctgaaaaagcgttgggatatgaaattccggcttaaaatactttttaagcgagtgtatgaaaaaatgtacataatttattatatattcggctaacaccattacatttgtttaaagtagttcgattttactaatgctttatttacaatttaaaaaacaccttgtgcactaaccactaaagcttttaggcattctgcgcatatgcaaattaacataaacacaaacaatgtcgcacaattacacaaataaatattttattcatatttatttgagatacgtgtgattaaatgtggcaaattgttagaattcattatgctttta

SEQ ID NO: 42323 - DNA, 1010 bp, DROSOPHILA
gtacaacaaatatggtatatgttgatcatcgagttctttggggaaaacaacatctcaaaatgatcaaaagctttaaaaaggaatgcaaaatttcaatagaatattggatctatacacatttgtaacacttttctttatgtgttctagactacccaatcgcatatgctctgtttgtgacggatatcagtgtgcccgagatcgtagattttcgggacaatgtgaccttatcttgcagctacgatatgcgaggtcacacgctaaactcggtcaaatggtacaaagatcacgaggagtttttcagatattcccccttgacgagtccgatttacatgactttcgatgtggctggtctgcaagtgctggaggggaaatacgtgtgcaacgaatcgagctgtcgactggatttgagtttacaaggtgccaagtccacaggactctataagtgcgaagttagcggcgatgcgccccattttaagctggcggacaaggccgacaacatgactgttgcaggtgagctttccataataaacgacccgctaatcgagagcttcaactcgatgtatcgcatggaggaataccttaaagccacctgcatatcggatttttccagcctgcccactcgactcacctggtacatcaatggcgagcagccgctcttaggcgaactgtatcccacaacggacacaagtttggcggcccatgattatgtactgaggcgacagcggcttcaggtgcaattctttttgcaggggcagcgctttttccaggccgggaaaatcctggagctcaaatgcgttgcggaaattgaaaattatccggagctgaggcgcgagaagacgctcagtgcgtcgctatcgcagtacgacaatttcaacaatcaaatgcctctgaggcatgcgaatgcaaactctggctcggcacaaaggagcatcctgtgcggcaggacgtcactaatttccgcattcctggcggcaattctactaattcactgtttgcgacgcccttcatga

SEQ ID NO: 42324 - protein, 255 aa, DROSOPHILA
MRGHTLNSVKWYKDHEEFFRYSPLTSPIYMTFDVAGLQVLEGKYVCNESSCRLDLSLQGAKSTGLYKCEVSGDAPHFKLADKADNMTVAGELSIINDPLIESFNSMYRMEEYLKATCISDFSSLPTRLTWYINGEQPLLGELYPTTDTSLAAHDYVLRRQRLQVQFFLQGQRFFQAGKILELKCVAEIENYPELRREKTLSASLSQYDNFNNQMPLRHANANSGSAQRSILCGRTSLISAFLAAILLIHCLRRPS

SEQ ID NO: 42325 - DNA, 3055 bp, DROSOPHILA
tcacgttctcctggcaaaatgaaacaaacgcagtgccgctgcaaaactagatattctccgtcatttgcgattcctgcattaatgaagcactcgctgtgcggcgcgcgaatgtgcgataatttattagtgccacatttgcgacacagatttcgatttcggaccgccgccggtggccaccaagtcaattcaatttcctcacgcgcacaccgcctgaccccttttggccacaaataataatgccgggcctatgtcagtctataagtctatcagcaccaaatttcgccaaatcccgtggcccatcgacacgatccatttagccacccatccatccatccgtcatccgccacctgttgctcgaatcgcaccagctgaacttcgaatccgcgcgaatgtcgggcatgcaaaagaggtgacgaccctgatcctcctctgagtcgctggtgaaatcaattgtatttcacaaaacaaatagagcaccgaccgtattcgaaaacaatttgtttctatcacaaacactcgacacgcgtcgtcttgtttgcattccagtccgctccacttccaatccgactgtccgcagcttcgcgcgcgtcttgaaagtcccgcactcgcaaacacactcgcgtccagtgggaccgcgccgaaagcgctggaaaataccaagcgacttgcaaataaataccacagttctcaacaccattgcagtttcagaaaataccacttatatttctataccaccaaattcaaattaattattaaaagcaaaatcaaaatcaaaatgcacgctagacaacctctataagatagatagtaagatctttcttttcttagcatttttgcatttcaccgacgcgaatttgacccttatcgattttttcggaataccttgcttacttactttaaaaacgtaacaaaaattacaataataaatgtttcaatttaatttgtgtataatatattatttatttaatacgtcatttggtgaaactaattaaattcactgcagcacttcagtttaactttcactgaaaaccagaaccccacattacactgcgctgataaggtccactctagcggaaaatgcgttagtgcgtgttgtttaccggcatgtccgaggtcgaaagagctctggatgttctgctccaggaagcggaggagctgtgcatcgggagcagcgtagtggagctggacaggattccaaccgccttggagttttgtcgggaattctactccaaaaaccagccggtggtcattcgcaaggcactcaattggcccgcgattggcaaatggacgccaaagtacctgatcgaggctctcggggacaggagcgtggatgtggcaatcaccccgaatggctatgccgacggcttggccactcaaaatggacaggagtacttcgttttgccgctggagacgaaaatgaagctgtccgaggtggtccgccgcctggatgatcccactggtgctgtccactacatacaaaagcagaactctaacctcagtgtggacctaccggaactggctgctgatctgcgggtcagtgatctcgactttgcgcagcagtcctttaacaaaccgcctgatgctgttaacttttggctgggcgacgagcgcgccgttacctccatgcacaaggatccatacgagaacgtgtactgcgtgatatccggtcacaaggacttcgttctcatcccgccgcaccagcttagctgcgtaccgcgaggaatttaccctacaggcgtttacaagacctcagatagtggtcagttctacattgaaccgttgagggatgaggaaggcagcgatcagttcacagaatgggtcagcgttgatcccttgtcacccgacctggccaaatatccggagtacgcccgggccaagcctctgaaagtacgtgttcacgcgggagacatcctatacctgcccaactactggttccaccatgtgtcccaaagccacaagtgcatcgccgtgaacttctggtacgatctggactacgatagccggtactgctactaccgcatgctggagcagatgacgtccgcaaggagtggctaatagaatccggagaagtatttattctcagggattgttaggtgaattcaaaacccttcttgttttcagtgtatttatatatattattgttacataatttagtgttaaataaaaaactgatacccaaaatgagttgcgaactacgactaaggacacgaccataaaagatttatcttttccgaaattcgtaaatgaaatatgaaatatccgtacagatgatgacttcttaaataaggaatgtttgctttgttgggttattctctagtctattcgagactgacgtcctgtttttctgcgccggaaggctccgctgcagcctgtccatctgcctcctcgtcgggattttcgttgttctcgcactccagttcgccatttcccgcggaggagacgttcttttggtccgcctcggccaagtctgcatcgttattcgagtcctgcgactgggattgggactgtttgcgcacacgctggttcttcagcttggccggactggctccagaaggtgtcaccttcgacttggtcttgcagctatcctgcggctgttccaccacaaacagctgctccaaataagaacggtaccaaagcaggaactcgtcccgctgtcgtggtatgtccatcttcttgatcttggcatatatgcgtttgggcgaaattagtggcgagctggcggtcgaattctgggcagcagtggccgtcagctttgatacctctgccagtagggagtcattgatgacggtgttgttgtgcgtctgattgcgaatgcgtttgataatgtactcgattagttcgtgatccggtgccagttctatgctggtccctggtcctgatcccgagccagaggcttgttctagttttccctcgaggatttgctggtaaggaagacgcaattatgagttaatcgatccagtttacgaaagcctttcttacctcttcgttctcggtcctaagagaagagataacagcagaagcactgtcctccatttcatccaggtgctgcccgttc

SEQ ID NO: 42326 - DNA, 1055 bp, DROSOPHILA
cagcacttcagtttaactttcactgaaaaccagaaccccacattacactgcgctgataaggtccactctagcggaaaatgcgttagtgcgtgttgtttaccggcatgtccgaggtcgaaagagctctggatgttctgctccaggaagcggaggagctgtgcatcgggagcagcgtagtggagctggacaggattccaaccgccttggagttttgtcgggaattctactccaaaaaccagccggtggtcattcgcaaggcactcaattggcccgcgattggcaaatggacgccaaagtacctgatcgaggctctcggggacaggagcgtggatgtggcaatcaccccgaatggctatgccgacggcttggccactcaaaatggacaggagtacttcgttttgccgctggagacgaaaatgaagctgtccgaggtggtccgccgcctggatgatcccactggtgctgtccactacatacaaaagcagaactctaacctcagtgtggacctaccggaactggctgctgatctgcgggtcagtgatctcgactttgcgcagcagtcctttaacaaaccgcctgatgctgttaacttttggctgggcgacgagcgcgccgttacctccatgcacaaggatccatacgagaacgtgtactgcgtgatatccggtcacaaggacttcgttctcatcccgccgcaccagcttagctgcgtaccgcgaggaatttaccctacaggcgtttacaagacctcagatagtggtcagttctacattgaaccgttgagggatgaggaaggcagcgatcagttcacagaatgggtcagcgttgatcccttgtcacccgacctggccaaatatccggagtacgcccgggccaagcctctgaaagtacgtgttcacgcgggagacatcctatacctgcccaactactggttccaccatgtgtcccaaagccacaagtgcatcgccgtgaacttctggtacgatctggactacgatagccggtactgctactaccgcatgctggagcagatgacgtccgcaaggagtggctaa

SEQ ID NO: 42327 - protein, 316 aa, DROSOPHILA
MSEVERALDVLLQEAEELCIGSSVVELDRIPTALEFCREFYSKNQPVVIRKALNWPAIGKWTPKYLIEALGDRSVDVAITPNGYADGLATQNGQEYFVLPLETKMKLSEVVRRLDDPTGAVHYIQKQNSNLSVDLPELAADLRVSDLDFAQQSFNKPPDAVNFWLGDERAVTSMHKDPYENVYCVISGHKDFVLIPPHQLSCVPRGIYPTGVYKTSDSGQFYIEPLRDEEGSDQFTEWVSVDPLSPDLAKYPEYARAKPLKVRVHAGDILYLPNYWFHHVSQSHKCIAVNFWYDLDYDSRYCYYRMLEQMTSARSG

SEQ ID NO: 42328 - DNA, 7985 bp, DROSOPHILA
tgtagagcctgaaggagccggtcaaatcactggcgttcggacgtaaaagcacctgggacaaaaagttggcgccgcgcgagatgagcttgcgcttgaagtcccagccaaagacacctccatttccggcataccgagtgccggatacaatgtcatagttgccctcctgttgcagcttaatgaactcgggaatgaatttgggctgaagcggaaaaaatatagcttattagtttatcttattattagtttaaccctgttatctagactcacatgatgactcaagtccgcatcgatgataactataaagtcgccggtggcatgtttgatgccatgtatgtaggccgttccgagtcccaatttggagccacgtggtctcagcacaatcttgtcctccccgtagatcttctgcaggtctttggccacgtctagtgttccatccggactaccatcatcaatcacaatcacctcgtattccaagccgctgcaaagggggagcaattaatacctgaatttgcaccttagagcagccgctactcacctcgccttcatgtatttcacaattagccatattataatgggcaaattatccttttcattgtaagtgggcatcaaaatgctgtatttatggccatttgttggcattgtaattgttctcaagaaccgtgtaaataatttcaattaaaactacaagagtgttggtcaattcaataatacaaaacagctggctcgaatcgatagcgaagtcgatagtggctagatagttagatagtggctaaaacgtatcgaattccaaatgtaaatttaaatgtgttaaataaatgatattaaaatatctaatttgacaaaatattgactttaatataaagctgaacaaataacattctatgtagatgatgtatgtttttggtatattcgcccagccgaataaagttttatagtatactttccagagcacaagggtaaaaatcataaaaaattgtgcggtcacacagttcgcgaacggccgctttaagaataagtgctcactttatgtgcggattagcgaataaaagtggcaaagtagtgcgcttttgacggcgcgacgtcaacatggctaagaaaataccttttaacgtggtgttcgcctcaggtaaacaaaacttcggatatattatgaactgaaagctgcagaaagatttttattatttatagttttcttatttgtttgctttattttgtgtgttttttatgttcttaattgcatttttagttgcgacaggatttggctgagagctaaacgtcttccacctccctttcttcctttaaaattcgctgcacttgagaaatcgataaatcacgcatacgcctagtgcgccaggacgttggaatttaaaatagactggcgctgcctttttaattgcagctaatcagctggcaatagtccgatttaaatatggccaggatgctaaatcaattttccaaagtctcggccaatttaccacgtcctaaaaccactgcaaccacgatgactgtaatatttcattataatattgtcagactgccgggttgtcgactctttttgtgtctgcatgtgcaatttgagttgcggccagagatttaaatttggccaaacgccaagctctttattttcatgctaggacctgacaaattttggttagcctcgatggcctcagcctcatcctccccagtatcacctactgggcctgctccgccttctttttggaccgatacttaagtttagttagaagcgatgacaccggcgcgataatggtgagtccataaacaatgccggtaatcagcatcatgccgggaataaagtcagtatccacatacttggtaaagaatttcgaatagtagcccaggtaaatggcgcccattcccagactaaaggtgaccaatccaaatagattatggcggaagcgaagctctgatggaggcattactttcagggcgaacttgggctggaaatagttgacaaaaccgcctacaatgctggccgcgcagaaaaaggaagcagctccccctgcaaaatgtcagctttaatcggttttcctgaattaacctaattatttactcacccactcggccgtgccaggtgttaaagtgcacctccttgctggaaaatttacccagggagcccaacagcaccatggagccacccacaatctgcaggatggcgtggaagcgcgacttgtttcggtgcgacagccaacgggtgagcgggttcactttcgaatgcgacatcatggcctgggcgataaggacgtggaactgtcgagagcaagaaaagccttttaattcagctccagttcgataagataacaagtgacgttgcatgtccgtgttatccaggtcgatctaacactattgattttgtggccaagtgcttatcgccgtgtactcactccagtcccggtcataaacatatgcatggcggtatccttgaactccagactgcgcgccagtatgaaaaagaagacggccaccagaaagatcagaatgtggttgatgctattcagcaggctgtggatttgcagccaggcagtggctttcgtgtaaccctccgccatttcaaaagattcaataatactatctgattcagtaacaaaacacgaacggctgagcgacgactaaactagcatgttaacatcgacatcgcttaaatatagaagagaagagcgtggaacctgaggatagagaacaacaagttagattcgtttgtactcgtacagctgcgttcgaataaatagtgatagttgagaattcttaaagtaactcaaatgtttttgtttatgctttccattttatacgtttcatcgcatatataactgataacctgtttctgaatatttaatagattttaaggcttattattttgggcacgcttgaatgctagctttcgttttgaccgctgctgttagcttagcaaccgaaagagaacgaaacatagtccgatatcgttatcatgtgcaactatttagctgagtgtgcgaaaaagagacttattaagagagtcataatggcctgcgccacctatacataggttataacgtcatgaaagtaatgatgattggatcgtttcgcttgcctttcagacgaggatgttaactttccggctagcgagttaaacaatcacggccccacagttcacggatggcgaagtgctccgaacggcagcctcacctcacatgacatcatcctccgattccagcagccggccaagatctatcgcatccagctcctggcacaccagtatcttatacgtaagttaatgtgctaagttaattggaattggctacaagcctaataagtacctagaaataatcaatgcctgatctttagtatgatcaaagatgaacatataaacaaacagcttgagtattccctataatgtgttgttttttcgtttagctgagaaagtagaactctggctgcactactcgcccaaatccctgcccagcactccatcctcgcagtactttgactttttgggttttgttgccctggcggataatgccaacacgaactacaagtctcgggagctgcagagcgtaaccgtgtgtccacgtaggggcacacatcttaagctgcgtctgattggcgtccaaggaaacgactacaatgacacaggccagatttccctactagcggtaaatgtcctgggcgaggatctggaagtggggccaaataatggcaacggagaggagcacttggccaacgaggccccaccgttggacacggccaccggagaactggccctggcctccgtctgtgatgacctgcttttctccatgtatgtggaggagtcaatagtgcagaccatccgagagttggaacagcgaaagattttggccgttaactcagaaagattcgagtacgcccgcaaactgaagctatgcatgacagctttaaggactgccggagaacgtttggggcgctatgctctggccaagaggcaggctgttcagcaggaggactttaccacggccaggctacgcaaggagcagatcgagatgtaccgggcggcagtacttcgacaattgcaggtgcatcagcttctggaaccgcagggtgtgaccttaagctccaatgaccaaagctgcgagatctatgcgggtgggaagcccagtctgccatcggctcctagcctgcaggatgtggcacaggcacttgcggaagccaccttcagtcccaagagcatgacgagtctcagcttagaggacaaatcctcgaccgatggctcccagcctggtaacgacaatacgttgacagctccggcacctgctccagcacccgctcctgcgcccacctctttgcaggccacgcccactcccacgctggggggctggcgcaagtcccacgacgagctgccgcagtcgccacgtctgccttcaaggcacagctcaccaatgtccagccgacagggatcgctgcgcaggcgcaacaagagcgttccacgaaactcctacgaagactacgaggagcgggccattcccacgctgcgacagtgagtagcgggcgtagagagtcgtaatcgttgtctgggtgtctagtgaatacgtaaacaattgtggaatagtaattacttcgtttgtttactggaaacagctgtctattacagtgttgcatgataaccggtactcttagtttgaatgtttgtcaacactagcgaccgttagaaacaacacccgttactttttttaatttaagatttaacgctcgcccagaatttcaaagaacgaaagagaatctattagcttaattttaagtaaagccgttttatctgctctaaacacatgaaaaggatttatctttttaaagcaaaagcaaaaattctttatatattgaaattaggtatttttgagatacttttaaatgttaggctttttgacagaaattttgcttttagatattttaaaaagtatttaaaatttgcttttagagaaaagtatttatgtttttattaacaacttagaaacttttataaaagattaaaaatagtttgaacggtttcatagttaatttcatataatgaaatttcgaaactatacacaaaactttaaattaggcgttatttgaacgcatttgaaagtaacatgttgttagatttacctttaatcgtacttacctttctactcctatatgtatattgtaaccgcatccgtaaacgttgccattccgatacaacaaacacaaaccgctcacagttcaaatactaatgaatttttaagggagtgccaaggcaacgcgctactggaagcggatccgaaccgtgggcgttcgcgcctgaacgaccgcgagcgtcgccaggcagcgcttcccatcctggtcttcggcaatgagctggtgagtcccccattaaatccaatagataacatattcaatacgtgccctacatatgtatattcccaggtggagcagttctattcgcgtcagtttcaggaccgcgaggatggcttgatgcgtctgcgtaacttcctaaaggagcacgacctgttagaggcgtcgagcaacgagcacgctgccagtcccaacaaagtggcccgcagcgccgcccttctgctgcatcgcgctgtaagagatgccgtttactccgtgtttagccaagctactgagacggtacgcatgctgttcctagagtatgtgcccggtcgagtttcccccaacgaggtggcacgttgcgtggaccgcctgctgcccgaattgctggccaagtccggcgatccatctgctcgattgcacactctggcccagcacacgatcctaagcatcgccgcctgtccggaggtggcggagcagcacctggttgcgccagcactatcacgaagcgttggatccggaacccaccagcgactggcaatgagtcggctgcagatgctggagcagctggtcaacactcagggcattagcacggacaagcatagtggactcacctgcagggcattgtccgagtgcggctgctccggcatccatcatccagcggagcctgtgcgaaaggtggccgagcgcatcctgctgctcgtctacaaggtgaatccccgactggtgcgcaagcagttacctccggatgacgacatcacgcgtcgcaatctcttgtaccgccaactcttcaccgaatttgacaagttggatctggaccgcaagcaggagctgctggaggctagcaagtatggcgggggtcacagctcgggcgatgcggcaacaccgccggcggataaggcgtccaccagctcagatgcctctcgactgatgaatagccgcagtggtcataacctaggcccaatggccagctccagtaatggatatgccagctgcaatggaaagcagcagtacaacgagcagctcaagcgctccatgctatccgtgagcaactcgcgcaagggatccgcttccaactcggagtccactgaagacaacacacccaaaatgtgtgtagtaaaattgaattcttcaaggatccgcaataatattaatactcttttagacgttgccccttttgcgactggtcgtgtgccggcagtgacgctactcagttggaccgacactactggaaggcgtgtcctttcctcaccaagtgcccacaatgcagtcaagtgctggaggttgctgctctgaactaccacctgacaagtaggtctgcaatataataccgtaggataactaatattgtgaatattccccagcggaatgcgatgccaaggagagctacgtggtctgtgtccgttgcactgaatcggtgcacaagcagctatatgaactacatcagatggaggactattgtcggggtagaaacttgaaattgagataaattctagagtcactatatcaccatttcccctctccagaactgaaaacgggtgctgctcgatgtcccctttgtcatgacgatgttcaccttccccaagacggcggctggaaattgcatctcctcagcgccggcggctgtcccgggaatatacgcaagaggaatctcaagaagtcaaattagaaagcgtacacttaatcgatctattggcctagcgaattagcgaatttattagagcaactattctagtcaggatacctactcaaggaagctatctaatttcagtcgcagcagccgaactcatttagttaaacaactaaaccaattcgtttctcactcagagcacttaagttagtcacattttgttaagccgattagttagatctattatgtgcattcttttgtattttttgtacgcaatgtgatttgttaaatgtaacgagaatttttgaaacgtccttacaataaataaagcccatccataccgttttaaacatgaatttgagtggtttgaatgtattactctagtccataaatgtgttaccttgcttgcattaaatttccaatttatatgcttggagtgcattccttaataaatttttaattgctttgcatataaggaatatgcaacacaattgcacgatttaccaaccataaatggttatgtgtgggcaatgcagtcattcaaatagaaacaactgcagtccacagcattaggaaaatgcaaataaaagatcaaataatataaattgtcaaacatgggtattttaaactttaatatcaaacaacttatcaagaaattaactacttcgtttaatttaatcatttttacatacgtaactagaaaatctaacattaattgctcttgatagctatacaatcattttcgaaacaaatcggattgaatcgactattacgatttgctggaccactatttttgcgcgctgcgctgtttcgtttcagcagtgttgtaaaacctccctagggtagcgcgtcagtgttggtggctgtgcgtgtgcgagcgtaaatgaagaaaaaacagccggcggcagcggcggcaacagaagcggcagaattcagttttcgcaataaaaataaacgcgagctatagctggccgaaagtcgtgcccagaattttcacttccgcatcggttaacgttagacttctgtcatcatgttctga

SEQ ID NO: 42329 - DNA, 2996 bp, DROSOPHILA
ccgctttaagaataagtgctcactttatgtgcggattagcgaataaaagtggcaaagtagtgcgcttttgacggcgcgacgtcaacatggctaagaaaataccttttaacgtggtgttcgcctcagacgaggatgttaactttccggctagcgagttaaacaatcacggccccacagttcacggatggcgaagtgctccgaacggcagcctcacctcacatgacatcatcctccgattccagcagccggccaagatctatcgcatccagctcctggcacaccagtatcttatacaaagtagaactctggctgcactactcgcccaaatccctgcccagcactccatcctcgcagtactttgactttttgggttttgttgccctggcggataatgccaacacgaactacaagtctcgggagctgcagagcgtaaccgtgtgtccacgtaggggcacacatcttaagctgcgtctgattggcgtccaaggaaacgactacaatgacacaggccagatttccctactagcggtaaatgtcctgggcgaggatctggaagtggggccaaataatggcaacggagaggagcacttggccaacgaggccccaccgttggacacggccaccggagaactggccctggcctccgtctgtgatgacctgcttttctccatgtatgtggaggagtcaatagtgcagaccatccgagagttggaacagcgaaagattttggccgttaactcagaaagattcgagtacgcccgcaaactgaagctatgcatgacagctttaaggactgccggagaacgtttggggcgctatgctctggccaagaggcaggctgttcagcaggaggactttaccacggccaggctacgcaaggagcagatcgagatgtaccgggcggcagtacttcgacaattgcaggtgcatcagcttctggaaccgcagggtgtgaccttaagctccaatgaccaaagctgcgagatctatgcgggtgggaagcccagtctgccatcggctcctagcctgcaggatgtggcacaggcacttgcggaagccaccttcagtcccaagagcatgacgagtctcagcttagaggacaaatcctcgaccgatggctcccagcctggtaacgacaatacgttgacagctccggcacctgctccagcacccgctcctgcgcccacctctttgcaggccacgcccactcccacgctggggggctggcgcaagtcccacgacgagctgccgcagtcgccacgtctgccttcaaggcacagctcaccaatgtccagccgacagggatcgctgcgcaggcgcaacaagagcgttccacgaaactcctacgaagactacgaggagcgggccattcccacgctgcgacaatgtatattgtaaccgcatccgtaaacgttgccattccgatacaacaaacacaaaccgctcacagttcaaatactaatgaatttttaagggagtgccaaggcaacgcgctactggaagcggatccgaaccgtgggcgttcgcgcctgaacgaccgcgagcgtcgccaggcagcgcttcccatcctggtcttcggcaatgagctggtggagcagttctattcgcgtcagtttcaggaccgcgaggatggcttgatgcgtctgcgtaacttcctaaaggagcacgacctgttagaggcgtcgagcaacgagcacgctgccagtcccaacaaagtggcccgcagcgccgcccttctgctgcatcgcgctgtaagagatgccgtttactccgtgtttagccaagctactgagacggtacgcatgctgttcctagagtatgtgcccggtcgagtttcccccaacgaggtggcacgttgcgtggaccgcctgctgcccgaattgctggccaagtccggcgatccatctgctcgattgcacactctggcccagcacacgatcctaagcatcgccgcctgtccggaggtggcggagcagcacctggttgcgccagcactatcacgaagcgttggatccggaacccaccagcgactggcaatgagtcggctgcagatgctggagcagctggtcaacactcagggcattagcacggacaagcatagtggactcacctgcagggcattgtccgagtgcggctgctccggcatccatcatccagcggagcctgtgcgaaaggtggccgagcgcatcctgctgctcgtctacaaggtgaatccccgactggtgcgcaagcagttacctccggatgacgacatcacgcgtcgcaatctcttgtaccgccaactcttcaccgaatttgacaagttggatctggaccgcaagcaggagctgctggaggctagcaagtatggcgggggtcacagctcgggcgatgcggcaacaccgccggcggataaggcgtccaccagctcagatgcctctcgactgatgaatagccgcagtggtcataacctaggcccaatggccagctccagtaatggatatgccagctgcaatggaaagcagcagtacaacgagcagctcaagcgctccatgctatccgtgagcaactcgcgcaagggatccgcttccaactcggagtccactgaagacaacacacccaaaatacgttgccccttttgcgactggtcgtgtgccggcagtgacgctactcagttggaccgacactactggaaggcgtgtcctttcctcaccaagtgcccacaatgcagtcaagtgctggaggttgctgctctgaactaccacctgacaacggaatgcgatgccaaggagagctacgtggtctgtgtccgttgcactgaatcggtgcacaagcagctatatgaactacatcagatggaggactattgtcgggaactgaaaacgggtgctgctcgatgtcccctttgtcatgacgatgttcaccttccccaagacggcggctggaaattgcatctcctcagcgccggcggctgtcccgggaatatacgcaagaggaatctcaagaagtcaaattag

SEQ ID NO: 42330 - protein, 392 aa, DROSOPHILA
MTSSSDSSSRPRSIASSSWHTSILYKVELWLHYSPKSLPSTPSSQYFDFLGFVALADNANTNYKSRELQSVTVCPRRGTHLKLRLIGVQGNDYNDTGQISLLAVNVLGEDLEVGPNNGNGEEHLANEAPPLDTATGELALASVCDDLLFSMYVEESIVQTIRELEQRKILAVNSERFEYARKLKLCMTALRTAGERLGRYALAKRQAVQQEDFTTARLRKEQIEMYRAAVLRQLQVHQLLEPQGVTLSSNDQSCEIYAGGKPSLPSAPSLQDVAQALAEATFSPKSMTSLSLEDKSSTDGSQPGNDNTLTAPAPAPAPAPAPTSLQATPTPTLGGWRKSHDELPQSPRLPSRHSSPMSSRQGSLRRRNKSVPRNSYEDYEERAIPTLRQCIL

SEQ ID NO: 42331 - DNA, 2712 bp, DROSOPHILA
atgcgaaatgaatgtaattagagtttgccaattgccgtcgtcagcgctctaataagcctctaattaagcacttgagcgggctcagaagtcgcacacgttttttcgttgtggttagagttcatctccaagatgggttttcaaatgtatacataaaagttccaagtaatttaggtcatgatctctcttattccagatttcaaaacctttttttttttgtaatgtttcatactaaagatgccaaaattccgtctattacatctaggcggattcgaataaaattcgaataaagcatttgtgtcagctttggcaacattagaaccgtataaacccagtaacagccgcccacccatacaaacacgagctaatcaggcttatttgttctgtctgagttggctggcctgactttttgccaaactggcttttattaaaagcgacaaaaacacatagctaacgattgcgcatacgccgcgtatgccgcccgagcaccaaaactgtattctaaacccaactctgcgctcgttcagcgagtgttacgccgtgctttgtggcttcgcatgtacaagtaatctaattagttttatgctaattagcacgcggctttaatttaataaattattatagcgcattatttggccaaaactacacgcgactggagcaacgaaaagggtttgggtattggaatgtttacggctcgactgatttgcgttgtcatttcgcaaatcggtgaataaagccaaagattaggttagttaaagcggtttaaagcacaaatcaactattacgaatcgccattgctgaatattttcgaaaatattttcgttttcctttattgactttcaaatgttacaacaagaattagatatcaacattactagtatatgtaattaaaacaattggcttggcttttagttgttattacatgtgcgcaattcaatcaacatataaagcttaatagacggcaaatggacgttagatattaaatctctaagtggaacacaatctagagtttgtaggcttgtctcatcataagatcaaaataagcgtcgttatcgatcgaggcgctgatcgtggcatagtagttgataaattcctccctggttacgatgccatccggatttggagcacccacctcgaagtttttcaggaactgcgtgaatatctggttttccgtcatctcgccacttaagtatttcggatgatcgcgcaccgaatatacattcttcaaatcggtgacagtaatttggccatcgccattggcatccatcttatcgaaggccttttcgatgatactgatacgcgaattattcataggaggctgaaaacaaagatattctcataaaaacattgttttgcattaaataaacattttatttacacgcagctttactaggaattctgtcatattaatattgccacttccatctgtgtcgaatctgggaaataaattaaaaattgtatttaatatcatattttattttttgtatttttacaatgaattatgatgatttttatgtttcaagagttatttaaaaacttttttcgttcaactactaattgaataagagctcaagtctccattttgcttttaagttgataattaccaacctggagaacatttcatcgatttcggaatcagtcaggtccaggccgatatccgtgactccttttttgaactcctcgggactgagagatttgctgccatcgtcgtccatcacccggaatgatctggaaatataaaacgaagtcagaaacgagaggcgcacaaaaataattcgcaatatgaatggcaaaatgaaaatatattcctattattgccacgggacaaagccagccggataagaatatgccattgatagatactcagaagagtgggcgccagtgggatcgggagtgggagctcattcagctatgcattcgatgcattgaattttccggctggcaaacaaacaaattgcataaatacaaatgaaaatgcgcgctcacgaggacgaggccaataggcacagccaccatccgaccgacaagccaacaaacaaacaaatgcacataccgtacatatgttgcagatgcgaggattttgtacaaaatgtctatatattcaaaacgggaaattgttagcagacagccgggcgggaaaaacaggtggggctggagattttgggcggtgggcggtacaggtggacgcggtttagctctactctgctctcagctcaaattgaaataaaaactaacagtgggctgagtcaaacactgtggggattgtggaaagagggcgtggcaggtcgctgaactggaagaaaaagtagtttctatacgaaaaaaaatattgttttacatctttagtgcacttatttaaatctaatttttaatgtgttgaaatcagttcaataaataaattcatttaatttgattgtgggattccaggctctttaatttctttaagtgcggctttgctcgacagcaactacagaaatccaattatgtttgtttgcattcagtcagcgatttttgccactcccccttcggcatcctactcctcagtcttccagcgagcttcatagttatagttttttctatttttcccttttttcctgcccggcctgcacacacttgaaagcgctttcgagaatgttagttcaacatgcactcgaactctcggtatgctcgtatttacatgcgcctagctgagcccaaacttaacatcatcatcag

SEQ ID NO: 42332 - DNA, 480 bp, DROSOPHILA
atggacgacgatggcagcaaatctctcagtcccgaggagttcaaaaaaggagtcacggatatcggcctggacctgactgattccgaaatcgatgaaatgttctccagattcgacacagatggaagtggcaatattaatatgacagaattcctagtaaagctgcgtcctcctatgaataattcgcgtatcagtatcatcgaaaaggccttcgataagatggatgccaatggcgatggccaaattactgtcaccgatttgaagaatgtatattcggtgcgcgatcatccgaaatacttaagtggcgagatgacggaaaaccagatattcacgcagttcctgaaaaacttcgaggtgggtgctccaaatccggatggcatcgtaaccagggaggaatttatcaactactatgccacgatcagcgcctcgatcgataacgacgcttattttgatcttatgatgagacaagcctacaaactctag

SEQ ID NO: 42333 - protein, 159 aa, DROSOPHILA
MDDDGSKSLSPEEFKKGVTDIGLDLTDSEIDEMFSRFDTDGSGNINMTEFLVKLRPPMNNSRISIIEKAFDKMDANGDGQITVTDLKNVYSVRDHPKYLSGEMTENQIFTQFLKNFEVGAPNPDGIVTREEFINYYATISASIDNDAYFDLMMRQAYKL

SEQ ID NO: 42334 - DNA, 2679 bp, DROSOPHILA
acttatgaaaatgtacaccacaatacaccacatatattatacttgaaaatgctaccttttaatcgtatattcgaatcctccgagcgatgagctgtgcgcacaaagagatgcccaaatttcaactgaaacgatgtgccgaaaacgaaaatattttgaatcgttttcgtgttcgtgtagagtttttagaaacagccgacaagcttttccacattaatatgaaagtctacaaaggaaactttttttatgtttagaaaaggaaggtaacaattaaattgaaaacatgcttaaaacattttttcgttgtaattgtaacagaagcattttcaaaaaaaaatttaaattaattcataaaaatatagttataaatataaacccctgtgttaaagtaaatgtacatcaattgcatgatgatttaggtgaacctgctgtgaatatggtgatccaaatttagacttccaagagtcatcgcctttcccaccaattcatttgccagttgtttgcaatgtttacatcgatatagtgataagataatctgaggcttgaaccttataaaggtacattttcacaagggaagagattcagttgaataaaaatctgacaatgagtggaggtgtgcggttcagaagttggaatacaaaactattataatttttctgttttgcagaagtaatatggtactttatctgcatattttgcggtgtttttggagcaagacccaaagacttggacgtttctggaacaacagatagcaccctagaaacggattcaactacttccggtctggaatatggtctaattacgggcaacttgagtatctgcggaaatgtggcagataatgtgtttctaccatttgtgggggactgtaataggtactacctttgtcgctgtgagtttggagcttaagatctttatattttggaatctttatcataatatgtttatttataatatttagctggacaagccatagaactgcaatgcgaatggccttatgagttcaatgcaaatacccaaagctgtgtacatcctggtgacgctgattgtctgcccacctgcgaggctttcaatttcagcaccttcagttaccagagaacctgtacgaggtacgtgctgtgctactacggaaaacccgttctacggcaatgccaggatggccttcaatacaactctgccacagatcgctgtgatttcccccaaaatgtcgattgcgtggagtccgagtgctccatctactccaatgcgtatcatttgcgctatgttcccagcaaggtttcctgccagaagtacttcatctgcggcaacggaattcccagggagcaaacctgcactgctggcctccactttagtaccaaatgcgattgctgcgatattccatctaagtcggactgtcaggtgggttaagaacaacagtacactcctaagggaaatagttgcataacccttttattttttagatcccagcagtggaaagaaaagtgcagcaactttcacgactttcacccgttactactgtaggaatctgccccccatccggggtccatttctatgtccatgagtctcgacgagatgcctattactattgcgtggatggacatggtctggttctggattgttcggcgggtctttggtacgaccccacggttcaggagtgtcgtgaaccccagaatgtgggcatgtaacatggttgatctgaataaaaattgtttttgtgacaaaagtactaaagatgtttcgatttttaaatgattaagctaattcgttgaaaatttatttaatatttatttattacttagtccacttcaactaaagttttatgtccgaatagtatgattttaaaataaagtggttatttgaatatgtattcaaatagctttttaacgtaaatttcccttgcaacaagttcaatcaatcaattggtaggtttaagatgattgtaaaaaataagtggatgccttatttaagacccattaacataatctgtcaagcttttcttttcatagtacgagtattataaaggcattcgtttgtttgaaatcgtattggatctttatttcgagtaactagaagcccacgaggtgtggttcacggcactcctcgcgcttggcatcgaacaccaggccgggtgtgcagtccaaggtgactccacgtccattcaggcagtagtagtacgcatcctgacgcttctggtgggcaataaagtgggcgccctccgatggacactcaatgtcggcgagacgtggcggagctcgggcaaagggcaggatattccgttgaaggctctccacctgaatgaaatgaataggtttttatgtggctcccagaaaacttcagataaaaaaaaacacgcaccgtgcagttgactttcgaggggaaatcgcagctctgagtgcttggattgtactgcaggccacttgtgcagttctggacttgaggaagaccatccatgcaaatgtagtacttgtcacagcgagccttgctgggtatgaaaacgatgtcatccggattattattccggctgcacagattgtccacgcagtcgacatactgcggatagtcacagcgatcggtcagggcgttgtactgcagtccatcggagcactgacggatcaccggagtgccgtcgaagcagagaacgtacttggtgcacgtgcgatcgtaacagaacgatgacaaaccacg

SEQ ID NO: 42335 - DNA, 543 bp, DROSOPHILA
atgcaaatacccaaagctgtgtacatcctggtgacgctgattgtctgcccacctgcgaggctttcaatttcagcaccttcagttaccagagaacctgtacgagatcgctgtgatttcccccaaaatgtcgattgcgtggagtccgagtgctccatctactccaatgcgtatcatttgcgctatgttcccagcaaggtttcctgccagaagtacttcatctgcggcaacggaattcccagggagcaaacctgcactgctggcctccactttagtaccaaatgcgattgctgcgatattccatctaagtcggactgtcagatcccagcagtggaaagaaaagtgcagcaactttcacgactttcacccgttactactgtaggaatctgccccccatccggggtccatttctatgtccatgagtctcgacgagatgcctattactattgcgtggatggacatggtctggttctggattgttcggcgggtctttggtacgaccccacggttcaggagtgtcgtgaaccccagaatgtgggcatgtaa

SEQ ID NO: 42336 - protein, 180 aa, DROSOPHILA
MQIPKAVYILVTLIVCPPARLSISAPSVTREPVRDRCDFPQNVDCVESECSIYSNAYHLRYVPSKVSCQKYFICGNGIPREQTCTAGLHFSTKCDCCDIPSKSDCQIPAVERKVQQLSRLSPVTTVGICPPSGVHFYVHESRRDAYYYCVDGHGLVLDCSAGLWYDPTVQECREPQNVGM

SEQ ID NO: 42337 - DNA, 3258 bp, DROSOPHILA
tcgccatcagcagcgctacagcttccaagcagggcaaccagtgccaaaagggtcaggcgacttatcactttggaaaataaaccaagttagatcatttcggttccatagctgcaattcatactcactattcaaggttggtttcctgcggttactatcgtcttacctcgaaaaacccctccatttataggcaaactcacttgccattcaatctgcgatttgttttgattccgtgcaaatttccaatcttatcggatgtggatgcatgtttccatgtggtaattggattgttcttcctcattcaaattcgtctggcggagataagttcggtgaacaagagccaatattcaggaacatacacctctgtcagccattaggaaacacgtgtattgatgagtcacagttgatcatcgaaccacggatcgctcaagatccgatgtaattgttacaagtgtttggaatatttggataggaagccccattactttgaagatctagaaattattaagttgtagtttaggtttaagattttcttcaagatatatgtatgtatatttgttgtacaggaaggaaatgctcctagttaatccaaatagaatgtattattctataaaattattttttattttatttatttttcttttcatatcttaatcgctagcgcagtaatactttgaatgtttaaaccactcgtgcactaaagtgataaaaaaaaaaaccacacgtgcaaggaaattaaaacacttttcatcgatatccacgggttctgggaaccagtctatttaaaacatttcgactatgactattatcgccaagtttggtggtgacaaattgaaagtcgaaatgtttgcagaaataatggcgtagttttcctctagaggagtcgtgtgccgaaataacctggttgataagtgtaaattggcaaaaactcattaggcgatgaaagagagtcgatataaaatgaatatttcctggcctgatagcaaacagttgtggcacacagttcaaactatccaggagtaagttgctcatgcgatgggattccctatagttcatttacctaataaatcgtaatttcccaagtgaagtggctattaaatgggctcctactactattcatcattttgatggttcatcggaaccgggccgatgaagatcttgtagtagctcccggtccagacgacgatggtgagggcctaaatgttcaggataaggatatttacgatatgtacgaaaacacccagataaatgtctgcggcaatgtggcggatggcgtttatttgccctatgttggaaattgctccaaatatatcgagtgtgaaagtgagttatatacactaaaacatcacataagtttttaaagcaaatgaaaaatatttttaatacattaaactatccatgtatttaagacaatactattaaggaagtaggcagctgcttggatttggcaaaggataatccagatatttgcgatccgaacaagtcgtgtgagctgggctacgatcctgttctccaagtgtgcacctacatggaggaggtacagtgtctgcccacctgtgagtcgttccgattgagcagcttctgctacgacaacacctgtaccaagtacgtgctttgctattacggcaaacccgtgctacgccaatgccacgatggactccagtacaacaacgccacggatcgctgtgacttccccgagtatgtggactgtgtggccaacgactgttccgccaccttccagccagaggacatcatctacctgggtagtaaggcatcatgcagcaagtattacgtctgttccaatggtcatccgtgggaacagcagtgtgctcctggcttggcctacaatcccagctgcaagtgctgcgactttgccaagaatgttaactgcacggtgagtagaaaaagtgaaagtggatttttttcatttcaaatatatatttttaaattgattgttttggattggtttaaagtacattttatactgcttctggagtaatttaataatttatttatttatacctaaatatctctagattgatgctgtagccaggaatattctgccatattcccgaacccctctgcgtcgtgctgacattaagtgtccccttatgggaactcacttcttcccacacaaatctcgccgagatgcatattattactgcgtcgaaggacgtggagtcacactagactgcactccgggtctttactacgatcccaaagtggaggattgccgcagacctgaattcgttggtgtctaactgagttttcataaataaataattacaacctgttgcttttgattttcgattttatgaaatgataagagattttgtgaatgtaagaagtgatacaaattgtttattctgaaatgttttttaaaagagcacataacatttttagtgtcgttattttaaagatttattaaagggaccaatcatttggtgtaagactctcttatcatcccaagaaagttccactagtaagaaatggaaaaaaataaattcaattaatttaccaataaaatgtttgctacaaaacgttacaatttgaattggatggcccgttcacaatggtgttttgtaaacggcgcatgtgctgtgcagccacagtgtttattttccaaaaaagagagaaagagtgctccacagagcaccccattcatgctcttctggttgcaaacgccaaccacccgctcgcccaccgagtggcacggccacatatacagaaagcaaaaacaaaacgctgtctgttggcaaaaaggaaaaagaggaaaaccatccgtgggggcggtgggaagtgaaagagcgctctgcgaaactcatgaaagtgaaaacgagcgcgacgctggcccagctgcattcacacattcagttggctgcgagtccttgcgccgttcgaatcgcaggcgaatcacccatcgtccaacacacaacctcacaaccacccaccacccaccgcccacctgcgtctcgggccgcaaggttggcaaaatacaattattcgagcgcgagtcagcggtggctgattttttgaattgaatcgaattgaattaaagtgaatacaaagttcgcatgagtcgcatgagtccttcgtgtgacgagctcttcgcaaaaaggatatttatttgccaagccagcctgcgtgtgtgtgtgtgtgtcatttgtgtgtttgtcgtgtcgggtcagttgagcgttcaaggactctgctgcagcaactacaaaatagcttgaaaaaccagtgccagaaacaacaatatgt

SEQ ID NO: 42338 - DNA, 966 bp, DROSOPHILA
ttcaaactatccaggatgaagtggctattaaatgggctcctactactattcatcattttgatggttcatcggaaccgggccgatgaagatcttgtagtagctcccggtccagacgacgatggtgagggcctaaatgttcaggataaggatatttacgatatgtacgaaaacacccagataaatgtctgcggcaatgtggcggatggcgtttatttgccctatgttggaaattgctccaaatatatcgagtgtgaaaacaatactattaaggaagtaggcagctgcttggatttggcaaaggataatccagatatttgcgatccgaacaagtcgtgtgagctgggctacgatcctgttctccaagtgtgcacctacatggaggaggtacagtgtctgcccacctgtgagtcgttccgattgagcagcttctgctacgacaacacctgtaccaagtacgtgctttgctattacggcaaacccgtgctacgccaatgccacgatggactccagtacaacaacgccacggatcgctgtgacttccccgagtatgtggactgtgtggccaacgactgttccgccaccttccagccagaggacatcatctacctgggtagtaaggcatcatgcagcaagtattacgtctgttccaatggtcatccgtgggaacagcagtgtgctcctggcttggcctacaatcccagctgcaagtgctgcgactttgccaagaatgttaactgcacgattgatgctgtagccaggaatattctgccatattcccgaacccctctgcgtcgtgctgacattaagtgtccccttatgggaactcacttcttcccacacaaatctcgccgagatgcatattattactgcgtcgaaggacgtggagtcacactagactgcactccgggtctttactacgatcccaaagtggaggattgccgcagacctgaattcgttggtgtctaa

SEQ ID NO: 42339 - protein, 301 aa, DROSOPHILA
MVHRNRADEDLVVAPGPDDDGEGLNVQDKDIYDMYENTQINVCGNVADGVYLPYVGNCSKYIECENNTIKEVGSCLDLAKDNPDICDPNKSCELGYDPVLQVCTYMEEVQCLPTCESFRLSSFCYDNTCTKYVLCYYGKPVLRQCHDGLQYNNATDRCDFPEYVDCVANDCSATFQPEDIIYLGSKASCSKYYVCSNGHPWEQQCAPGLAYNPSCKCCDFAKNVNCTIDAVARNILPYSRTPLRRADIKCPLMGTHFFPHKSRRDAYYYCVEGRGVTLDCTPGLYYDPKVEDCRRPEFVGV

SEQ ID NO: 42340 - DNA, 3100 bp, DROSOPHILA
acgttcttaactggacttgagtggcgtgtcctcttagccggactaacagcttaacaatgcctgcaactgccactcaaggaaaatactttgctaccctcattcctatcgcaactaacattttaaattgaatatattcttatataatcctttttaattactatctgcggtttgcttaaaatatttatcctcagcaataaaataacagattaattaataataataatttttaaattcatcacacttgctttctgcacgtttcatgcagtgtgtgcgtacttttagtaagtattcataatattagttttcatatagtttatttcacttaatactgatttatcttccacactttttcatgcatactaattattaaaaggcaaatttataacaagttggcttctcatactttatagatcaattctccaacttgattgattcagctaaatcgaatttcgaaagaatcaataatttaaatttcccaattttatgtaatagctcccgatgctaaaattaacaccacataaaattttccagcctccctcatttgcttcctctttccgcatcgaaagcggaagtaaaagaaaggccgcacaaaatggcgggggctataatttaaaaataacaaagtgtaaatcatacgcgtggtgagattgcctcgcgcttgctccactgggtgggtgtaaattgggtgggaaattgaaggggggcccaggaaaacgcactcaagcacgcagcacggagcacaggccacataacagatgctaattaatggcggctgtggaaaagggagccaccataatggagcctgcaggatgcaggagccgagcactgtatctgaatctgaacctgaagccaaggacaacgatggcaagtgtctgttgggaatgtgccgctaattgccggcaaatgcgtcgaattacggttcattggcttgctcgactcggggagtcgagttttaaatttatcgatcaaagcttagatttttcccacacggagactatttctatttctgtataacctttacctataaatgttaaataaatagtgaaaatgtgatcaagcataaatttacttaattagtaacttaggtgatcatttaaattataccatgataatcatattacaataactaaccttgagccagttgtcggacaacttgagagtcctcacggattgggctagagctgcaggcacctgacacaatccagtgccactggcatccaactcctttaggctccaggaagcaacgaactcctgcatcgccactcccacatctggattgtaagcgatggaaaggctgaccaaatccggaattccttgcagagcacgaatagcggatccactcaagcggttatgggataaatccagatattgcagattcggtagtgccaaaaatgtttcatagtcaatatccgagatgttgttgtgactgagaactaacgtttgtagttccaataaattatagaatgattcccgggaaatatttagcaattcattgtgagccagattcagatttttcaactgaggcaatcgctgggcaaaaaagctcgtagaaatttggctgaatttgttgcaggaaagatcgagcgtcacaaagggtagtgacatattggtgtctgccaaactcaagggtattacctccagggagttatttcccaagtccagctgcctcagttgattgaagttgtccaagctgaggctctccagttgattgctgctcagatccatggcggtgatcacttgaaagtcgcccttccactgaccaccagtgctattgaatgtcctcaaatcgcggtgggtgagattaagcttgttggccggcgcattcagctccagctcccttttgtggcgtttctgttggtatcgcaattccccccgaaagctatccggttcgttttcgtccctcagcatacgatggatactctggtagctgagccgtcctacgtcctgccgggacaactgctgctcctcccgttcagcggccaggcgtgatgaggtggggatgtcgaccagatgggccgccaccaccagccttgttagccacgtccaggccaggagaagggccaggcctagatcacagtgttggttcacgattttcaccattttgcgacccactttcaacctttcttttttgaattggtggtataaatggggaggtcctcgtttcgtttcggttatttttttttttatttttttggctcttttatttcacttggaatttatgctcggtacgtgcgaacgtttaacgttcaattttgaatatggctgctagctcattcatttcctcgttcatccgttcgttcatctggttttccgggggcgtcacgtgcgcgcctttttggccaaacatgtgacaagtgtcggcggcagtcagaggcggatgttgcccgagggcaatggctgcgtttccggtccggcggccattgctcaagcagcgtgctcaaatgccattgcacacggctgctgatgctggatgttggctgctggacgctggttgatgctggcgaggttgatgctgaatttttaattaaatcaacttgatcgttctattccgggtcgacgtcgtctgttattgtttcccccttttcaattcaacgttctgcaattgttttacaattttaattgcactgctttgtgttttgctctgcgtttttttttgtgttttcatttattttttttcacgatgctaattgctgttgaacaaaacgcaactcaactcgagcaaatgtcaattaaaaagcgagcattccagctactcctgatggcccgcttttggtattgttttgttgtccttagccaactgttgtcacattacaatgccaagtgctccctcggcgtttttgttatcgcgtgcttaaaatctgaaataaaacgtgaaaaaattgcttgtaattacgctcttgttagctgtgtgaatgcaaaaaaaggtggcaaaggtagaagttgcttttaaatatctttctccctgttcttctcctgtttccctgcttttcatcgcattttaatttctactttggctttacgacatcagagcgctttggcagttgcctttagtgttatttttatgttgattgcagctaatgaaattataatttcaacacgc

SEQ ID NO: 42341 - DNA, 990 bp, DROSOPHILA
atggtgaaaatcgtgaaccaacactgtgatctaggcctggcccttctcctggcctggacgtggctaacaaggctggtggtggcggcccatctggtcgacatccccacctcatcacgcctggccgctgaacgggaggagcagcagttgtcccggcaggacgtaggacggctcagctaccagagtatccatcgtatgctgagggacgaaaacgaaccggatagctttcggggggaattgcgataccaacagaaacgccacaaaagggagctggagctgaatgcgccggccaacaagcttaatctcacccaccgcgatttgaggacattcaatagcactggtggtcagtggaagggcgactttcaagtgatcaccgccatggatctgagcagcaatcaactggagagcctcagcttggacaacttcaatcaactgaggcagctggacttgggaaataactccctggaggtaatacccttgagtttggcagacaccaatatgtcactaccctttgtgacgctcgatctttcctgcaacaaattcagccaaatttctacgagcttttttgcccagcgattgcctcagttgaaaaatctgaatctggctcacaatgaattgctaaatatttcccgggaatcattctataatttattggaactacaaacgttagttctcagtcacaacaacatctcggatattgactatgaaacatttttggcactaccgaatctgcaatatctggatttatcccataaccgcttgagtggatccgctattcgtgctctgcaaggaattccggatttggtcagcctttccatcgcttacaatccagatgtgggagtggcgatgcaggagttcgttgcttcctggagcctaaaggagttggatgccagtggcactggattgtgtcaggtgcctgcagctctagcccaatccgtgaggactctcaagttgtccgacaactggctcaaggtaaaggttatacagaaatag

SEQ ID NO: 42342 - protein, 329 aa, DROSOPHILA
MVKIVNQHCDLGLALLLAWTWLTRLVVAAHLVDIPTSSRLAAEREEQQLSRQDVGRLSYQSIHRMLRDENEPDSFRGELRYQQKRHKRELELNAPANKLNLTHRDLRTFNSTGGQWKGDFQVITAMDLSSNQLESLSLDNFNQLRQLDLGNNSLEVIPLSLADTNMSLPFVTLDLSCNKFSQISTSFFAQRLPQLKNLNLAHNELLNISRESFYNLLELQTLVLSHNNISDIDYETFLALPNLQYLDLSHNRLSGSAIRALQGIPDLVSLSIAYNPDVGVAMQEFVASWSLKELDASGTGLCQVPAALAQSVRTLKLSDNWLKVKVIQK

SEQ ID NO: 42343 - DNA, 7799 bp, DROSOPHILA
aactgcacggtgagtagaaaaagtgaaagtggatttttttcatttcaaatatatatttttaaattgattgttttggattggtttaaagtacattttatactgcttctggagtaatttaataatttatttatttatacctaaatatctctagattgatgctgtagccaggaatattctgccatattcccgaacccctctgcgtcgtgctgacattaagtgtccccttatgggaactcacttcttcccacacaaatctcgccgagatgcatattattactgcgtcgaaggacgtggagtcacactagactgcactccgggtctttactacgatcccaaagtggaggattgccgcagacctgaattcgttggtgtctaactgagttttcataaataaataattacaacctgttgcttttgattttcgattttatgaaatgataagagattttgtgaatgtaagaagtgatacaaattgtttattctgaaatgttttttaaaagagcacataacatttttagtgtcgttattttaaagatttattaaagggaccaatcatttggtgtaagactctcttatcatcccaagaaagttccactagtaagaaatggaaaaaaataaattcaattaatttaccaataaaatgtttgctacaaaacgttacaatttgaattggatggcccgttcacaatggtgttttgtaaacggcgcatgtgctgtgcagccacagtgtttattttccaaaaaagagagaaagagtgctccacagagcaccccattcatgctcttctggttgcaaacgccaaccacccgctcgcccaccgagtggcacggccacatatacagaaagcaaaaacaaaacgctgtctgttggcaaaaaggaaaaagaggaaaaccatccgtgggggcggtgggaagtgaaagagcgctctgcgaaactcatgaaagtgaaaacgagcgcgacgctggcccagctgcattcacacattcagttggctgcgagtccttgcgccgttcgaatcgcaggcgaatcacccatcgtccaacacacaacctcacaaccacccaccacccaccgcccacctgcgtctcgggccgcaaggttggcaaaatacaattattcgagcgcgagtcagcggtggctgattttttgaattgaatcgaattgaattaaagtgaatacaaagttcgcatgagtcgcatgagtccttcgtgtgacgagctcttcgcaaaaaggatatttatttgccaagccagcctgcgtgtgtgtgtgtgtgtcatttgtgtgtttgtcgtgtcgggtcagttgagcgttcaaggactctgctgcagcaactacaaaatagcttgaaaaaccagtgccagaaacaacaatatgtgtgcaataaatgcgagaaacgtgacatcaacgtgccaataggcaaaaggcattgaaaagctgaaaggaacaccacgtttcggtgcgaacgagaatccgagaaaatattgcaggtaaaaagctgagtgagtgatgcacttgaaaacaacccacatctgcacattcgcagacagaatcgcatgcagtcagcgctcattgctcatacgcagcgtgtacgccatcaagtgggcagggagacattgttccttcttatggccttttgttgcgacgactgacagacagacagacggaaggaccgacggtcactcagacagccaaccgctaaatcctgaaaaagtcactcgaataagaaggaaaaaaaattcacttcccgccaacgaaaagaacgagcggcaaaggttaatggcaaaaacaaaccatacgagtaagagtaaaatggccaaaacggggtgtttaaacagcatgggggatttgtttgtgcctttaagattacagtttgcattttgttttggcatctttgtgcaatgacgcatagattttatccaacggaggtgagcataagtgtctgtgaaaacaccacgaaaaaaaaattgttcctgctttaaagtttacgttttgtgttttgttttggcatcttttccgagtgacgcataaatgtacattttatccgctggaggtgaggataaatgtctggcatttcatttatgcaatggtcgctgtgttgggatagctctttatcccatgaatttcctcaataaccgagaaattttgtttaataaacatttcgttagcttcgtcagcgtctcatttgcgcggaatttattcaaaactctcagtatacgaaagaatgatttttaaacaattaaattaaatataaaaatttaaaatcaataaagcaattcttcctaaatttgcccaaggagaaaatccaatctagtcataggaattaaaacattaccaataagccaactgttttaagtatctagctcccgtatttgactttctatatttaatcacatttagatcccacttatgattagtttagattttcgctttgattcaatttactggcactttgcccaaccgaaagcctcctgtggctcacaagaggctcttcggacggactatattcaactgtttccgtggtgtagcggttatcacatctgcctaacacgcagaaggcccccggttcgatcccgggcggaaacaggtgaaaaaattttttaattttttgttattcggattgatgtaaaagatgtttgaatttttatcaatgaaactgtagttgctatgcgatatttcaagtcagcctgtatggagtagatgtatttagttgacatatttgagtaaaagggtttcatttggtcatatatttcctatgataaattccaataggaaattgtaatgtacgtttttttaatacaataattgtaaggttcaaagtaactcatgatgcgtacactaaataacaagctaggattgatagataatttaattaatgcttaaatactttattgcaagtatatactaatggcttaaaacgtttaagttacacataaagcgagcaatcaagaactagcaaaaaaaagtgaaatatttatgcacatatctataaatttcaattaatactcaaatactttatacctaaatatcgttagaggagaactcagccatttagtctggtggtttcttaaaatacgaattgtataaaaactaaaaaaaaagtttatcacctgtttccgcccgggatcgaaccgggggccttctgcgtgttaggcagatgtgataaccgctacaccacggaaacagttgaaacttaagcggcagagaggccaacttcagcgacctcaactgccaagggtcaaaaataaaactggttgcttgaataaaatcgtatattgtatctatttgagtgatttttatgggaaatgtttcaaggagacccaatgattgggcagtttgtctttgttaatggtattcagctcagtgaaggggaaagagcacggctgataatagaattattttaaggtggctgctgagatagtgattcatatatggtgctttgttaaaattaattgaatgggcgttccgtgagggcggattcactttcattttttatgctggtagaccagaaattacttttatgattatctagcaagggcaatacctcactgggaaaggtcactgcccgacttcctttaagttccgcaaagaatcttgaccagcatcgaggcgaatcgagctgaaccctgccccgaatggtaagcaaactaaatgcttgtattcagggtggcaggagcacaaagcattgaaccctccagcgggatgagggcgatggaattggtggtggccaaaaacaaaccgaaatccgagtggcgccagccgagaaatagaaacgaaatgaacctatcaaaaggttgtcaaaatgtctcttttaaatatgtttattttattgtcctcgcccgtgctcgagtatttatttattctcactcagatctctatggctttgcgttgtgtaattctgctctcgaagatgttgacaggcattgaactttgaacctagctggcaagtgaaacaggaaagttccccaaataaaagttattttattgtacggttgacttttatggcttgtggtcacggtgcctcggtactcggtgcgtatgtgcacttgattgtttacgcgacacggcaaattgtctgtgggataatttaaaaaattcattatttttcccgccgtcatcgttgattggctaacaccacagagaccaccaccaaacacaaaaatcgagtccagagggacagttcaacgaacagctaagcgagttaagaaccaaaaatgcaaacaccaggcacaatgggatcgggggtttccttctctgccaaaacactttcaagagcagaggaaagtacgtgtcataattcatctttgaacccttcgtgaaccctggacctgttagctttgctttactgtcaacaaaggtgttcttaaagcaacgggttgtttaggggtatattttaattaacttagatccgaattttacaggtttttttttgtcaaccctctgttgcaaagttcatgtaagtaattgattcaatgactgttaaataaacaactagaacatcttgacccctatgatcccaactgccgcctggccatgtcctttccaaacaccccacacccacacgaaaatctgtctgtgcgttttggcgcgctggggtccttgcggccgtgttggtgttttgggatgttttggatgtggctgggtgccaatgacacgggaagtgaaagcgttcaatgaatgttttatttttcgggcgggttccttgaccaggcaatggcagtcaacggcaacctttgttccttgttgcaccttcgaacggggaagcacaaagaggaaatgccaaagcaggtcctggatggggtttcctcgctggtgagaggcagcctcatgaaatgggatgcgcacgtttcctgttttagctttttgcaacagcaataaaggaaccgagaccaagtccgtaaacgtggaatgactcccttccgtctggcagacacaaagccaaatgagtcagatgcgctttgtctagtcaaggattttaccccatactaaacacacagcttgaacttcaaataagtttgcagcacttaatgccgactgtctgtctgtctacgctaaaaatgcgtacgttagatttgttcaaacgaagaaaaaggctttaaggctttaaagtacatacattgtattgtattctacattctttgtaataaatagaatatttttcaaccactttggatccgtgactatactgcaaatgcagttcttacgttgctattttaattactacatgttcatagatttttaataatattttacaatctttttaattagcgcaacttacatttctcgtcatcgccatgcatttctggattgacaagcgctcacagcagtgcggatttggacggtctcgcgtggcggcctccttgtcgcacgctggcagcggtctcagctatggccatccgccacgaaggaccaagtccaccagctgcagcaacagcactggacagtcaatgccaccggtgcatcgatctctgccgcagacgccgtacgatatgcatcagcccggcaccagtcgccagtcgcagtcgtcatatggcaacaacaattccctgcatgcccagcagcagcaacattccagcagcggtggaaccagcaataacaataacttgactgccaccggcacaacaacaactgccagcaacaataaccatgccagcggaatagcctcatcggcagcagtcctcaccggaagcggaaccattgttccgctggtggcacgaggatcgcactacaatcaccacggcaacacgcgttatcagccaaggacgcagcagcaactgttgcaacagcagcagcaacagccacaccagcaccaacagcagcaacatcagcagcatcagcagcagcagcactacagctaccaccatccgcaattcggcaacatggctgtgcccatgagacactacgatgcacatcagcaacagcaacagcagcaatactcgggcaacgtctacgcgtgagtagctcggatttaaagggtgttaccctctcaaaaaatgagtatcctgtttaactattgaataaccttatttcagtgacgatgcctacagcgcctatcaccacaccgcccatcaccagcacagcagcaatcactcgaccagcggcagcaacaaccagcgtcaagcgtccgcctacgccacgccacgtcgccacaattccagcagcaacatgcgacactcgacgccagcagcagcggcaaccacaaccacagagacaccaagtgtcgccagtccagcggcagcagtggctgctgcacctgccacaatgcatagcagccacttgcagcagcaccatcatgcactgctgcagcacgcggactcgcaactgttgcccagccatttgaagtgcggcatgtgcgcctcgctggtgctggcctccgttttcgtggcaggaacaaagttctacttcgaccaccagggcactgggctggaggtgctgatcttctgcaccttttcggccttctttttggccgcctgcttgatcagcctgtgccgcattccgaaaggcctcttctcgagttccagtggctcgaatggccgagcagcggtttgccatagccgtggtgtcaactcctcgttagcgggaaccggagctgcacagtccgccggctgcctgctggagatgagcgagggacggtatctggaggagcggcaggtgacagcagtgggcgggacggcggctacagccggtccgccaccctaccatatagccatattgctgccggaacagacgccggcgacaatgggcaaacaactgccgttggatgaatcaccgccgccatcgtacgacaagattctcgtataggctgtcgaggaattgagcctcagttggagttcgtgggccctgatccttgacaaccccttaatgcacaatgccaagtacttttgctcagtatttttctaaaaaacgatatcacagtttatatgaacatttacacggcatagatatacattaatataatatatatacatacatatatcaaataaacatatacgcatacacaaatatttacttttaagctccgaacaatatttttacactttctatgactcgtactagaacccaaaactcttccacaccagacccaaatatgtcatattctactgtcatttttgttctgtgatatgctcaagagatcaagaaaacataagctatagtgaccgcaagattaaagtgtgttaaaccattagttaccgaacacgacaagccaatgcaacgagaaaaatgatgtagaaatagcgctgatacagtcattaaagaattcaagcagcagtattagtaggcagttaagtaataaattaaccaatcaaaggcccagtcctcatacaaaaaacgaaaagagagtgcaatatactaagtaaaatatgacatatattaaataaagtatcgtaaatgtaatttcatgttgtattattatttcaccaaaaattcacggtaaatgggaatagatgttgtcaattttctaaacacaatatctcataagtaaccttgagataatgtttaacaccaatttctaaattacatctgatggtcaaagtctattgggaaattaagaaaaagggcagttttgaatactttaaatatgtacttgaaatcttgaagtatttacttttagtacccgttaatcgtagaagggtatactaggagtcgttgaaaaaaatgtaccagcttaaacgatgtgtttccgaccctataatgtattgtatatacatatattcttaatcaataatcaatcagtcgacctgcccgttatatttttaagttttattattttttactcaagctttattgatattccaaaaaa

SEQ ID NO: 42344 - DNA, 1942 bp, DROSOPHILA
tccttgcgccgttcgaatcgcaggcgaatcacccatcgtccaacacacaacctcacaaccacccaccacccaccgcccacctgcgtctcgggccgcaaggttggcaaaatacaattattcgagcgcgagtcagcggtggctgattttttgaattgaatcgaattgaattaaagtgaatacaaagttcgcatgagtcgcatgagtccttcgtgtgacgagctcttcgcaaaaaggatatttatttgccaagccagcctgcgtgtgtgtgtgtgtgtcatttgtgtgtttgtcgtgtcgggtcagttgagcgttcaaggactctgctgcagcaactacaaaatagcttgaaaaaccagtgccagaaacaacaatatgtgtgcaataaatgcgagaaacgtgacatcaacgtgccaataggcaaaaggcattgaaaagctgaaaggaacaccacgtttcggtgcgaacgagaatccgagaaaatattgcagcgcaacttacatttctcgtcatcgccatgcatttctggattgacaagcgctcacagcagtgcggatttggacggtctcgcgtggcggcctccttgtcgcacgctggcagcggtctcagctatggccatccgccacgaaggaccaagtccaccagctgcagcaacagcactggacagtcaatgccaccggtgcatcgatctctgccgcagacgccgtacgatatgcatcagcccggcaccagtcgccagtcgcagtcgtcatatggcaacaacaattccctgcatgcccagcagcagcaacattccagcagcggtggaaccagcaataacaataacttgactgccaccggcacaacaacaactgccagcaacaataaccatgccagcggaatagcctcatcggcagcagtcctcaccggaagcggaaccattgttccgctggtggcacgaggatcgcactacaatcaccacggcaacacgcgttatcagccaaggacgcagcagcaactgttgcaacagcagcagcaacagccacaccagcaccaacagcagcaacatcagcagcatcagcagcagcagcactacagctaccaccatccgcaattcggcaacatggctgtgcccatgagacactacgatgcacatcagcaacagcaacagcagcaatactcgggcaacgtctacgctgacgatgcctacagcgcctatcaccacaccgcccatcaccagcacagcagcaatcactcgaccagcggcagcaacaaccagcgtcaagcgtccgcctacgccacgccacgtcgccacaattccagcagcaacatgcgacactcgacgccagcagcagcggcaaccacaaccacagagacaccaagtgtcgccagtccagcggcagcagtggctgctgcacctgccacaatgcatagcagccacttgcagcagcaccatcatgcactgctgcagcacgcggactcgcaactgttgcccagccatttgaagtgcggcatgtgcgcctcgctggtgctggcctccgttttcgtggcaggaacaaagttctacttcgaccaccagggcactgggctggaggtgctgatcttctgcaccttttcggccttctttttggccgcctgcttgatcagcctgtgccgcattccgaaaggcctcttctcgagttccagtggctcgaatggccgagcagcggtttgccatagccgtggtgtcaactcctcgttagcgggaaccggagctgcacagtccgccggctgcctgctggagatgagcgagggacggtatctggaggagcggcaggtgacagcagtgggcgggacggcggctacagccggtccgccaccctaccatatagccatattgctgccggaacagacgccggcgacaatgggcaaacaactgccgttggatgaatcaccgccgccatcgtacgacaagattctcgtatag

SEQ ID NO: 42345 - protein, 475 aa, DROSOPHILA
MHFWIDKRSQQCGFGRSRVAASLSHAGSGLSYGHPPRRTKSTSCSNSTGQSMPPVHRSLPQTPYDMHQPGTSRQSQSSYGNNNSLHAQQQQHSSSGGTSNNNNLTATGTTTTASNNNHASGIASSAAVLTGSGTIVPLVARGSHYNHHGNTRYQPRTQQQLLQQQQQQPHQHQQQQHQQHQQQQHYSYHHPQFGNMAVPMRHYDAHQQQQQQQYSGNVYADDAYSAYHHTAHHQHSSNHSTSGSNNQRQASAYATPRRHNSSSNMRHSTPAAAATTTTETPSVASPAAAVAAAPATMHSSHLQQHHHALLQHADSQLLPSHLKCGMCASLVLASVFVAGTKFYFDHQGTGLEVLIFCTFSAFFLAACLISLCRIPKGLFSSSSGSNGRAAVCHSRGVNSSLAGTGAAQSAGCLLEMSEGRYLEERQVTAVGGTAATAGPPPYHIAILLPEQTPATMGKQLPLDESPPPSYDKILV

SEQ ID NO: 42346 - DNA, 4901 bp, DROSOPHILA; identical to SEQ ID NO: 27211

SEQ ID NO: 42347 - DNA, 1218 bp, DROSOPHILA
acaaacgaagtaattactattccacaattgtttacgtattcactagacacccagacaacgattacgactctctacgcccgctactcactgtcgcagcgtgggaatggcccgctcctcgtagtcttcgtaggagtttcgtggaacgctcttgttgcgcctgcgcagcgatccctgtcggctggacattggtacttattaggcttgtagccaattccaattaacttagcacattaacttacgtataagatactggtgtgccaggagctggatgcgatagatcttggccggctgctggaatcggaggatgatgtcatgtgaggtgaggctgccgttcggagcacttcgccatccgtgaactgtggggccgtgattgtttaactcgctagccggaaagttaacatcctcgtctgaaaggttccacgctcttctcttctatatttaagcgatgtcgatgttaacatgctagtttagtcgtcgctcagccgttcgtgttttgttactgaatcagatagtattattgaatcttttgaaatggcggagggttacacgaaagccactgcctggctgcaaatccacagcctgctgaatagcatcaaccacattctgatctttctggtggccgtcttctttttcatactggcgcgcagtctggagttcaaggataccgccatgcatatgtttatgaccgggactggattccacgtccttatcgcccaggccatgatgtcgcattcgaaagtgaacccgctcacccgttggctgtcgcaccgaaacaagtcgcgcttccacgccatcctgcagattgtgggtggctccatggtgctgttgggctccctgggtaaattttccagcaaggaggtgcactttaacacctggcacggccgagtggggggagctgcttcctttttctgcgcggccagcattgtaggcggttttgtcaactatttccagcccaagttcgccctgaaagtaatgcctccatcagagcttcgcttccgccataatctatttggattggtcacctttagtctgggaatgggcgccatttacctgggctactattcgaaattctttaccaagtatgtggatactgactttattcccggcatgatgctgattaccggcattgtttatggactcaccattatcgcgccggtgtcatcgcttctaactaaacttaagtatcggtccaaaaagaaggcggagcaggcccagtag

SEQ ID NO: 42348 - protein, 228 aa, DROSOPHILA; identical to SEQ ID NO: 27213

SEQ ID NO: 42349 - DNA, 2851 bp, DROSOPHILA
tctggtttgctctctagaatcttggtgtgcggtgatgagacccagaagcctttcccactgctagtttggcacctttcgcagcgaaagctgctctatgacctccgaattccgcaccacgacttcatcacctccctctccgcgatcacccacgagggttcctacgtttgcgtggtggccaaagagctgaacgagccgacgacgcccaacttcattgtggtatacgacttacagagcggcactctgtttaagaaatggaagcccgcctgcaacacagtttccctggccatctcccaggtgaacgcttgcgtcatcgccggcctagaagatgccaaaatcctaatctgggacctggtcacgggcaactgcaagagcaccttgatcggccacaatgcaccggtaacgttcttgaagctggatccattgggaaaggtgctgctctcctacgacaaggagggacgtgattcggccgtccgtatgtgggagttgaattcgggtatgtaccacggtcttcgccctactgaactgtatagtcatccttctggtcttgcagccaaatccctggccgtgtttaagccaccggcgcaagtgagcacttgtgagattctgccgaacggagccttcgtggtgctggctctcaaggatcgcaactccttgctgaccctggctttgaagaactacggcggaggatcgggcgccctcgacgatgactgtggcactctttacggcaatccagacaaccagcacaaagttttcgacttgagtaattaaatcaattaacgctagttatcattattcaaattataaatgaagcataacagggtgctagaccgaggaaggcagaactctgaattattataaatatggcaaacaaatttctcatgcataattcattagatgtatgtaaaattctttgagcaaatcttaccaaatgtacaaagcaaagaaaatccaaagaacattaaaaatttaaaaatctacccagctaatggtggttttctctttatgtggtcgcaaacagatacaaaaggttcttggcaaactgaataatctcggtcccgccgagcttggaggtgccataaatacggtccacgaaggtgatgggcacctcggcgatggtgtagccgtgctgtctagcccgaacgagcatctccatttggaacacgtagcctttggacacgcagctggcaatgcatttctccagtacatccttcttgtagagcctgaaggagccggtcaaatcactggcgttcggacgtaaaagcacctgggacaaaaagttggcgccgcgcgagatgagcttgcgcttgaagtcccagccaaagacacctccatttccggcataccgagtgccggatacaatgtcatagttgccctcctgttgcagcttaatgaactcgggaatgaatttgggctgaagcggaaaaaatatagcttattagtttatcttattattagtttaaccctgttatctagactcacatgatgactcaagtccgcatcgatgataactataaagtcgccggtggcatgtttgatgccatgtatgtaggccgttccgagtcccaatttggagccacgtggtctcagcacaatcttgtcctccccgtagatcttctgcaggtctttggccacgtctagtgttccatccggactaccatcatcaatcacaatcacctcgtattccaagccgctgcaaagggggagcaattaatacctgaatttgcaccttagagcagccgctactcacctcgccttcatgtatttcacaattagccatattataatgggcaaattatccttttcattgtaagtgggcatcaaaatgctgtatttatggccatttgttggcattgtaattgttctcaagaaccgtgtaaataatttcaattaaaactacaagagtgttggtcaattcaataatacaaaacagctggctcgaatcgatagcgaagtcgatagtggctagatagttagatagtggctaaaacgtatcgaattccaaatgtaaatttaaatgtgttaaataaatgatattaaaatatctaatttgacaaaatattgactttaatataaagctgaacaaataacattctatgtagatgatgtatgtttttggtatattcgcccagccgaataaagttttatagtatactttccagagcacaagggtaaaaatcataaaaaattgtgcggtcacacagttcgcgaacggccgctttaagaataagtgctcactttatgtgcggattagcgaataaaagtggcaaagtagtgcgcttttgacggcgcgacgtcaacatggctaagaaaataccttttaacgtggtgttcgcctcaggtaaacaaaacttcggatatattatgaactgaaagctgcagaaagatttttattatttatagttttcttatttgtttgctttattttgtgtgttttttatgttcttaattgcatttttagttgcgacaggatttggctgagagctaaacgtcttccacctccctttcttcctttaaaattcgctgcacttgagaaatcgataaatcacgcatacgcctagtgcgccaggacgttggaatttaaaatagactggcgctgcctttttaattgcagctaatcagctggcaatagtccgatttaaatatggccaggatgctaaatcaattttccaaagtctcggccaatttaccacgtcctaaaaccactgcaaccacgatgactgtaatatttcattataatattgtcagactgccgggttgtcgactctttttgtgtctgcatgtgcaatttgagttgcggccagagatttaaatttggccaaacgccaagctctttattttcatgctaggacct

SEQ ID NO: 42350 - DNA, 726 bp, DROSOPHILA
atgccaacaaatggccataaatacagcattttgatgcccacttacaatgaaaaggataatttgcccattataatatggctaattgtgaaatacatgaaggcgagcggcttggaatacgaggtgattgtgattgatgatggtagtccggatggaacactagacgtggccaaagacctgcagaagatctacggggaggacaagattgtgctgagaccacgtggctccaaattgggactcggaacggcctacatacatggcatcaaacatgccaccggcgactttatagttatcatcgatgcggacttgagtcatcatcccaaattcattcccgagttcattaagctgcaacaggagggcaactatgacattgtatccggcactcggtatgccggaaatggaggtgtctttggctgggacttcaagcgcaagctcatctcgcgcggcgccaactttttgtcccaggtgcttttacgtccgaacgccagtgatttgaccggctccttcaggctctacaagaaggatgtactggagaaatgcattgccagctgcgtgtccaaaggctacgtgttccaaatggagatgctcgttcgggctagacagcacggctacaccatcgccgaggtgcccatcaccttcgtggaccgtatttatggcacctccaagctcggcgggaccgagattattcagtttgccaagaaccttttgtatctgtttgcgaccacataa

SEQ ID NO: 42351 - protein, 241 aa, DROSOPHILA
MPTNGHKYSILMPTYNEKDNLPIIIWLIVKYMKASGLEYEVIVIDDGSPDGTLDVAKDLQKIYGEDKIVLRPRGSKLGLGTAYIHGIKHATGDFIVIIDADLSHHPKFIPEFIKLQQEGNYDIVSGTRYAGNGGVFGWDFKRKLISRGANFLSQVLLRPNASDLTGSFRLYKKDVLEKCIASCVSKGYVFQMEMLVRARQHGYTIAEVPITFVDRIYGTSKLGGTEIIQFAKNLLYLFATT

SEQ ID NO: 42352 - DNA, 3906 bp, DROSOPHILA
gttgcgaaagcagtggcgtttcctccaaacagagcgaaggcagttcgacatccaagtccaatgaccttagtatccgcattgatccgcgccaatcgctggcctatcagctctcggaagaaaactttcaggtgctcgacagtaaacattcgacgcagccggagaaggtgctcggtcacggcatggacttcaaacagcatagctccagtccgcgcttcttttaaccaacacgttcagtagcctttgccgcacataaccagccgaacattccgcaggtactggatgtgtccatcgaatctgggtcggacttgtgctcctgttccgcgcggctggacgagatcagcaaactattggactcgatcgatgagcgtgtgcgacgattggagggcatatactctttatagccttctaagctccctaaaatacaattaaacgtagttaaaattaatgtaccaatcataattaatagcgatccttgataattaaattgtgaaattattaaatatatctgctccactgtatgacgcattttataaaaagcaattgaacaattttagatccatcactatgaattttattttgcaatttaaaattaaaatgattgctgtaaataccctttttcgtttaaatatatttatttttataaaatattcaaaggggttccgatggctcatacccctaaaaagaaaatggtaaagatcttactctctaaatatgtttatttaataacaatcgtgttcaaattaactttatttggatattttgaattcatttaaatgcctaaacaagattttaaatactgagagcacactcgaatttataatatatataagaataaaagtaataaacaatttttacatagaaacaaaattatttttcaaaataatttatttaaaattgaatcttcatttaaaaacggaatgggttgagtcttcgttgaactaaaagccaggttgccatacatttgacacattaacatttggtattttcaaacactagtcaacggcatcactggctcatataaataaacaaaacccgccggagaaagtggcgataaacagcgcccataaaacgtcaagatgcgtgactggatgccagtgctcttctgcggactgtccgtgccgatctcgctgttcatgtggctgggcaatgtggcgctgtccaagttctggagcagtgactttgagggtgagctatatggattccagtgcgaacgttacctggggtcaactaatgccaaaaggttatccgacagagtcccgggtgattccgccggtgcgctggctcttctccacactggcgcccttggccctgatgactgtggctctgcgccggaggagcgtcaaccgatctggagctgcgctgggcattctggtggccttcattctctccatcgccagccatccgttcttcgccagcttggtggtgttcttcttcagctcatcgcgggccaccaagttccgcgcgcacatgaaacgccgtttcgagagcgattttcgcgagggcgaaggccaacgaaactggatacaggtactctgcaacggaggcatggccgcccagcttgcattgctttatctgctggactgcggtagtggcgagcgggcggtggacttcgcacgagaataccgatccagctggctgggtgtggccgttatgagtgcgtttgcctgttgcaatggcgacacctggtccagtgaactaggatccgtgctgtcgcaacgcgatccagtttctatcatcacctggcgcagagtgccgcgcggtaccaatggtggggtttcgttgctcggcgtcgcggtgagtctgctcggcggtctgctcgtcggctttggctatttcgtcaccgttcgttacacggttgaggccaaaatgcttctgattagcccaccacaatggccaatcatcgccttcggtggcatcgctggactttttgggtcccttttggactctgtcctaggtggtctgctgcagttctcgggcatcaatgaggaaggcaagattgtggatacacctggaaagggagtgcgccacgtaagcggactgcgcatcctggacaaccatagtgtcaacctgatttccagcatcgtcaccggcgtcaccattcctctcctggcccagagattctggcccgtgcgctaatgctgttttggattaggattagctgcattcaatagctaaaaatgtcaaaggctgcctcacaagattgaattccgtgttaaacataaacccatcctcataaagccttttagacaggtatatatgtacaattgttaaccatttataatttcataacgccggtgaaataccctccatagatatatttttatgaagcttacatatcgcctagcgaactaaccaacctatgagactcgatgaaaacaacgattgggcaccgaatagccaaggcagttagattatatttactctaaggtagctaaccatgttcctttacggattatgacgttgttgttactgtgactgttcacctccattttgtgtattaactctactaaacacgaaccgtacatgtggatctattgtcattgtctcgaaattctcgtacgtgacggaatacattttctgatttggttatgtatattcttatggcgtcatctcaagttgttttcaacaatttggagatcaatgattggttcccgctggaataattttagcagacctcgctccaaatcgaatgttttgcttattgcacaagcaattgctgttgtggtgattaaaatattcatgaaatttctataacacaattcgaaatttttgaatttgaggtaatagaatagaattaagttcttcaactgagggttttaaaaatatcttttgttcgaaatatagctactactcataaagtcttcgaatccattgttgttagtacattaaaacatgaatccaattgaaaacccgtggttttgttttcgttaataatgtatatctaatatttttgcactttattggctcttcttagtttttgaagttcaaaatttcgaattaagttttgcgaaagagcacgtaaagcctcactggacgaactatgtgaacccgcagtgctggtagctccacccggagtggttggcttggcaaatccgattgagaacttgatcattaggtcgccaattggcgagttgacgaattgcgagcccgttgagatggtcttgaagatgatgcgacgcttgtgctggtaaacctgcgggtcacttggcaggctgtttcccggctgaggatttgccttgggtttggtgctggaaccaatcttgggccgtggagtgctggtggtcacatttggtgattgctctgtggtgctggtttggttcaatggactttccgagatcctgggctgagcagtggttcttgtcctggtggttcgtggctgaaaagtggttgtgctgcgtcgtctgtacggtttgcgagtggtggtggttggaaggctcaacgaaggtgcctggtagcctgggtcctcatcctcgggagcatctgacacggcgtccggtttctcggggtccgacggataaccctgatccgtctgatcctcctcgtcctcgtagtcatcctgtagatcaccatctcgatctccgccggagaagtacggtggctggtgtggtggtttctgatcgcgacgatcctgcttctcgcggtgctgctcgtagacagggtcattgggagccgatgaggccaacacttgttccatctgcttttgaaggatctcgtagagcggcgtattctgcacatcctctaggacttctgcaggttcgcttggcacaaactgattgttgatataggcattacgtccatccaggtcttcttctagttccagctcttcatctttacgggaacgagactccgtttgcagcttctcggctgggggttgggtcactccttcggttacctcgacaggagcag

SEQ ID NO: 42353 - DNA, 1839 bp, DROSOPHILA
cggcatcactggctcatataaataaacaaaacccgccggagaaagtggcgataaacagcgcccataaaacgtcaagatgcgtgactggatgccagtgctcttctgcggactgtccgtgccgatctcgctgttcatgtggctgggcaatgtggcgctgtccaagttctggagcagtgactttgaggagtcccgggtgattccgccggtgcgctggctcttctccacactggcgcccttggccctgatgactgtggctctgcgccggaggagcgtcaaccgatctggagctgcgctgggcattctggtggccttcattctctccatcgccagccatccgttcttcgccagcttggtggtgttcttcttcagctcatcgcgggccaccaagttccgcgcgcacatgaaacgccgtttcgagagcgattttcgcgagggcgaaggccaacgaaactggatacaggtactctgcaacggaggcatggccgcccagcttgcattgctttatctgctggactgcggtagtggcgagcgggcggtggacttcgcacgagaataccgatccagctggctgggtgtggccgttatgagtgcgtttgcctgttgcaatggcgacacctggtccagtgaactaggatccgtgctgtcgcaacgcgatccagtttctatcatcacctggcgcagagtgccgcgcggtaccaatggtggggtttcgttgctcggcgtcgcggtgagtctgctcggcggtctgctcgtcggctttggctatttcgtcaccgttcgttacacggttgaggccaaaatgcttctgattagcccaccacaatggccaatcatcgccttcggtggcatcgctggactttttgggtcccttttggactctgtcctaggtggtctgctgcagttctcgggcatcaatgaggaaggcaagattgtggatacacctggaaagggagtgcgccacgtaagcggactgcgcatcctggacaaccatagtgtcaacctgatttccagcatcgtcaccggcgtcaccattcctctcctggcccagagattctggcccgtgcgctaatgctgttttggattaggattagctgcattcaatagctaaaaatgtcaaaggctgcctcacaagattgaattccgtgttaaacataaacccatcctcataaagccttttagacaggtatatatgtacaattgttaaccatttataatttcataacgccggtgaaataccctccatagatatatttttatgaagcttacatatcgcctagcgaactaaccaacctatgagactcgatgaaaacaacgattgggcaccgaatagccaaggcagttagattatatttactctaaggtagctaaccatgttcctttacggattatgacgttgttgttactgtgactgttcacctccattttgtgtattaactctactaaacacgaaccgtacatgtggatctattgtcattgtctcgaaattctcgtacgtgacggaatacattttctgatttggttatgtatattcttatggcgtcatctcaagttgttttcaacaatttggagatcaatgattggttcccgctggaataattttagcagacctcgctccaaatcgaatgttttgcttattgcacaagcaattgctgttgtggtgattaaaatattcatgaaatttctataacacaattcgaaatttttgaatttgaggtaatagaatagaattaagttcttcaactgagggttttaaaaatatcttttgttcgaaatatagctactactcataaagtcttcgaatccattgttgttagtacattaaaacatgaatccaattga

SEQ ID NO: 42354 - protein, 330 aa, DROSOPHILA
MRDWMPVLFCGLSVPISLFMWLGNVALSKFWSSDFEESRVIPPVRWLFSTLAPLALMTVALRRRSVNRSGAALGILVAFILSIASHPFFASLVVFFFSSSRATKFRAHMKRRFESDFREGEGQRNWIQVLCNGGMAAQLALLYLLDCGSGERAVDFAREYRSSWLGVAVMSAFACCNGDTWSSELGSVLSQRDPVSIITWRRVPRGTNGGVSLLGVAVSLLGGLLVGFGYFVTVRYTVEAKMLLISPPQWPIIAFGGIAGLFGSLLDSVLGGLLQFSGINEEGKIVDTPGKGVRHVSGLRILDNHSVNLISSIVTGVTIPLLAQRFWPVR

SEQ ID NO: 42355 - DNA, 2611 bp, DROSOPHILA
taccaggttgccgcagcagcgaatcaccagcagcgattgcgagctggtggccgtcctgtgtgagcggatctcatcgagcacctcctccagatcgcgtctggagatgcgcccaatgcgacgaacatcctggtccagccggcgaatctgtttatccaaactcaactcagctttggccgccgcattcgtggcaaaaccactaggaagataattaaaaataaacttaattaatatataaagatatatgaattaacaaaatcctaacgtccttatagattattttccggctgaccttaatgagaaactgagttgttataagataatcgtgttgctttttgaataaaaataagatatttagcttctttctacatatataactagactttctacaagaaaaacgctcgactaaggccaaaattggatgagcacatagtaggcgctccaaatccggatgaggttatgtaaatatgtgagacatcagtcgaatgcaactgcgatgatcccaagtggcggcacgtgcgcctcttttcgggattcaatcgctggaaagtggacgattccccactaatcacgtaaatacatgagcacattgcgtaatgccggcgatttggggccagattttactcacttttggaactggccgcacatgcagggcgcattgttcagcagattgctcgtctcgttctcgcgaaccgagttcaccagcacattgcgtgtgaagccggcgaagtagcgcagcagtttgcccgtcctcaggatggatgccatggcggaatcgttcggttttaattaataaatgagcttattattaaaatgacgttcgcacgagtgcggctgaaaccgatgtctcttcgcgcctatcgatgtttacctgcgacaatcgattgttttcggtgggaccaaaacgttcaaatcaaatgtatcagcttagcggtgacacaaacgagaggatatttgaacagtgcctaagcctgtcagcttaaccgatttaatttgctttttttcggatcggaaactctaatcgtaccccgtatatacttgaactaaaatgtctctgaatctgcagtacgaggacattggcaaggaatttgtccagcagtactacgccatattcgatgacccggcgaatcgggagaacgtgattaatttctataacgctaccgactctttcatgacctttgaaggcaaccaaatacagggagcacccaagattctggaaaaagttcagagtctgagctttcagaagattgccagagtgataaccacagtggattcgcagccaacttccgatggcggagttctgatcatcgtccttggaagactaaaatgcgatgacgatcccccacatgcattctcgcagatctttttgctgaagcccaacggaggatccctcttcgtggctcacgacatcttccgtctgaacatccacaactctgcctaggagcactccagacccatatgtacaccacacataatcgacatccaaagacgcccagcgcctaatagtgataacatgataacaacagcacggcagtgggactcagaaaaaagcaaaacaaagccagccaacggtctcaagatcgtcagcgaatacaaaagttaatacaagacaaacaaaaaaataattaaaaaaagcttaggacttttattttgaaaactttttcgagaaataaaatagaaacaaatcttttcccaattcacaaataatgggtcacattggaattttgaagcaatagtctttaatatttgtagtcttcatacgatgcatgttttattctagcttaatttttcggagctgtctttgtgtttgcaatgccaaaagtgcgctgtaaatgcaccgcaaagaaagagaacaatccacctgactaagagaaactgcatgctccctattcatttgctgctattgcggagcgtcatttctgcagcagacgccgccgttgacgtcggcgtcgacgtagctttcttttgtggcgaatttggaactggaaattgcatttcatttgcaaacgtatcgttgcacacggcggttcgcgaatcgcgcttcctcttcccgctgcagctgtgtgcgtgttgtggtgtactcgtattggcagcgcgtatgtgtgtgcgtaactacactgcaaattgtgacggattcttgtgttcctcagggggaaataacttgcgtttgacaggtgcgatctagtgtgccgtctcaaaaatgaaaaaaaacgatgtctggttgcattctctatttgcgccactggtaagcgagaaaattgattaaaatgcacattacaaagggggaaatatattttaaaaaaaatatgtagcttaaatcttaagtattcccgtgtgtgtgtgtgtgtgtgtgtgtgacagagagaacgagaaggagagagagagagaacgagagagtgcagccagaaattgcaatacacacaaacaaattgccacgcaaaaagcggccggcttgccctcccccttccctccgccattgctgccccccccttcgtccatccctttgtatgtgtgcattggatgcacttggtgcgattcatttgcttttattaccatttttgcccgtctctccactcttttttttcttattttgtggggccttctgcgcgatggc

SEQ ID NO: 42356 - DNA, 611 bp, DROSOPHILA
tcggatcggaaactctaatcgtaccccgtatatacttgaactaaaatgtctctgaatctgcagtacgaggacattggcaaggaatttgtccagcagtactacgccatattcgatgacccggcgaatcgggagaacgtgattaatttctataacgctaccgactctttcatgacctttgaaggcaaccaaatacagggagcacccaagattctggaaaaagttcagagtctgagctttcagaagattgccagagtgataaccacagtggattcgcagccaacttccgatggcggagttctgatcatcgtccttggaagactaaaatgcgatgacgatcccccacatgcattctcgcagatctttttgctgaagcccaacggaggatccctcttcgtggctcacgacatcttccgtctgaacatccacaactctgcctaggagcactccagacccatatgtacaccacacataatcgacatccaaagacgcccagcgcctaatagtgataacatgataacaacagcacggcagtgggactcagaaaaaagcaaaacaaagccagccaacggtctcaagatcgtcagcgaatacaaaagttaatacaagacaaa

SEQ ID NO: 42357 - protein, 130 aa, DROSOPHILA
MSLNLQYEDIGKEFVQQYYAIFDDPANRENVINFYNATDSFMTFEGNQIQGAPKILEKVQSLSFQKIARVITTVDSQPTSDGGVLIIVLGRLKCDDDPPHAFSQIFLLKPNGGSLFVAHDIFRLNIHNSA

SEQ ID NO: 42358 - DNA, 3773 bp, DROSOPHILA
tgcattttggcaaagaacagttacgagttacgagtagcatgctacaggtggaaatcgtgtgcttgtcacactaatttctcaaagttcgagcccagttcgcagttctcgattgggtcggtggtttcgtttgtagtccgctcctttggccgttgcactttcacagttgcactcctgtcacatttcgttgtttaatttgatgtcagtttttagacctgtaccggggtccattgcccgacatgctggcgaacgcataattagccgatagagatagcagcagcagcagtagctgcagaaaggagccattgaacttggccaaaacccagcggaggatcattagagaagtttactgaacggcagcaggttgaagttgaatgaactagcccagagttcgacggtcaggagaaaggataatgacagcacaggtagggaccactcaggtctaatacatctgctgttccccacaggagacatatgttcgaggatcgcctagaagtgatgagttcccatcagcaacctgttgcagaaatcactgtttgaaaatgacaacatagatttatacatgatttttggtttgattatgttatagtataacaaccagacatgcgcaaaaatcaagacatacattatttttctatggtttctatgcattagaaatatgcatagaaataaagtacatatagaaatacaaaaatagatgcttgaaaaaagttttaaagtttagtttaaaagttttaaagatttagtctgcttaaatcaagccatatcttaagattatttaaatagtaagccaaaccatctattcctagaaacacttttaaaaaatttaatattttaaaacgaagtttgaagtcttaaaataaattctaataatttctaataaatgtttatttaaatgcaaaaactttggcgccaatttaatgtcagggcgctgttaacttactctgtaatgaagtatatcttcatcaatagatggcgctttaacatctgtcattcagtatatttatcgggcaacttggtatatctcagtaatcgaaatacggttacactgggcctacgcgattcaaattccgataaccgatcatttcaaataacgcgtccaaaaatcgacgacgcaattttctcatttaaacttcagcgtcaaagcaatactgatttgtcaaaaattcccatcacaagtctaaattaaagacaagatgcaaggactgttcagggatccggcactggagcgccacttcactggccactcgggcggcatcacacagctgcgctttggtcccgatggcgcccagatcgccacctcgtccacggactcaacggtgatcctgtggaatctcaaccaggcggcccgctgcattcgctttgcgtcgcactcggcgccggtgaacggtgtggcctggtcgccaaagggcaacctggtggcctccgccggacacgatcgcaccgtaaagatctgggagcccaagttgcgtggcgtttccggggagtttgtggcccacagcaaggcggtgcgcagcgtagacttcgactccaccggtcacttgatgctcaccgcctccgatgacaagtcggcgaagatatggcgcgttgccaggcggcagtttgtgtcttcgtttgcacagcaaaacaactgggtgcgcagcgccaagttcagtcccaatggcaaactggtggccaccgccagcgatgacaagtcggtgaggatctacgatgtggacagcggcgagtgcgtgcgcaccttcaccgaggaacgagccgctccacggcaactggcctggcatccgtggggcaatatgttggccgtcgccctcggctgtaaccgcatcaaaatctttgacgtttccggcagccagctgttgcagctttacgtggtgcactcggcgccggtcaacgatgtggcctttcatcccagcggacacttcctgctctccggaagtgacgaccgcaccatccgcatcctagacctgctggagggaagacccatctacactttgacgggccacactgatgcggtgaatgcggtggcattcagtcgcgatggcgacaaatttgctaccggtggcagtgatcgccaggtgagtttctgtttcttaataaaggtatgaagataattttactccttgatttctgtttcgcttgcagctcctggtctggcagtcgaacctacacacctatgatgcttcgcagtttgaagccaagtctgcgctggcttcctccagttgcgaaagcagtggcgtttcctccaaacagagcgaaggcagttcgacatccaagtccaatgaccttagtatccgcattgatccgcgccaatcgctggcctatcagctctcggaagaaaactttcaggtgctcgacagtaaacattcgacgcagccggagaaggtgctcggtcacggcatggacttcaaacagcatagctccagtccgcgcttcttttaaccaacacgttcagtagcctttgccgcacataaccagccgaacattccgcaggtactggatgtgtccatcgaatctgggtcggacttgtgctcctgttccgcgcggctggacgagatcagcaaactattggactcgatcgatgagcgtgtgcgacgattggagggcatatactctttatagccttctaagctccctaaaatacaattaaacgtagttaaaattaatgtaccaatcataattaatagcgatccttgataattaaattgtgaaattattaaatatatctgctccactgtatgacgcattttataaaaagcaattgaacaattttagatccatcactatgaattttattttgcaatttaaaattaaaatgattgctgtaaataccctttttcgtttaaatatatttatttttataaaatattcaaaggggttccgatggctcatacccctaaaaagaaaatggtaaagatcttactctctaaatatgtttatttaataacaatcgtgttcaaattaactttatttggatattttgaattcatttaaatgcctaaacaagattttaaatactgagagcacactcgaatttataatatatataagaataaaagtaataaacaatttttacatagaaacaaaattatttttcaaaataatttatttaaaattgaatcttcatttaaaaacggaatgggttgagtcttcgttgaactaaaagccaggttgccatacatttgacacattaacatttggtattttcaaacactagtcaacggcatcactggctcatataaataaacaaaacccgccggagaaagtggcgataaacagcgcccataaaacgtcaagatgcgtgactggatgccagtgctcttctgcggactgtccgtgccgatctcgctgttcatgtggctgggcaatgtggcgctgtccaagttctggagcagtgactttgagggtgagctatatggattccagtgcgaacgttacctggggtcaactaatgccaaaaggttatccgacagagtcccgggtgattccgccggtgcgctggctcttctccacactggcgcccttggccctgatgactgtggctctgcgccggaggagcgtcaaccgatctggagctgcgctgggcattctggtggccttcattctctccatcgccagccatccgttcttcgccagcttggtggtgttcttcttcagctcatcgcgggccaccaagttccgcgcgcacatgaaacgccgtttcgagagcgattttcgcgagggcgaaggccaacgaaactggatacaggtactctgcaacggaggcatggccgcccagc

SEQ ID NO: 42359 - DNA, 1706 bp, DROSOPHILA
ttatcgggcaacttggtatatctcagtaatcgaaatacggttacactgggcctacgcgattcaaattccgataaccgatcatttcaaataacgcgtccaaaaatcgacgacgcaattttctcatttaaacttcagcgtcaaagcaatactgatttgtcaaaaattcccatcacaagtctaaattaaagacaagatgcaaggactgttcagggatccggcactggagcgccacttcactggccactcgggcggcatcacacagctgcgctttggtcccgatggcgcccagatcgccacctcgtccacggactcaacggtgatcctgtggaatctcaaccaggcggcccgctgcattcgctttgcgtcgcactcggcgccggtgaacggtgtggcctggtcgccaaagggcaacctggtggcctccgccggacacgatcgcaccgtaaagatctgggagcccaagttgcgtggcgtttccggggagtttgtggcccacagcaaggcggtgcgcagcgtagacttcgactccaccggtcacttgatgctcaccgcctccgatgacaagtcggcgaagatatggcgcgttgccaggcggcagtttgtgtcttcgtttgcacagcaaaacaactgggtgcgcagcgccaagttcagtcccaatggcaaactggtggccaccgccagcgatgacaagtcggtgaggatctacgatgtggacagcggcgagtgcgtgcgcaccttcaccgaggaacgagccgctccacggcaactggcctggcatccgtggggcaatatgttggccgtcgccctcggctgtaaccgcatcaaaatctttgacgtttccggcagccagctgttgcagctttacgtggtgcactcggcgccggtcaacgatgtggcctttcatcccagcggacacttcctgctctccggaagtgacgaccgcaccatccgcatcctagacctgctggagggaagacccatctacactttgacgggccacactgatgcggtgaatgcggtggcattcagtcgcgatggcgacaaatttgctaccggtggcagtgatcgccagctcctggtctggcagtcgaacctacacacctatgatgcttcgcagtttgaagccaagtctgcgctggcttcctccagttgcgaaagcagtggcgtttcctccaaacagagcgaaggcagttcgacatccaagtccaatgaccttagtatccgcattgatccgcgccaatcgctggcctatcagctctcggaagaaaactttcaggtgctcgacagtaaacattcgacgcagccggagaaggtgctcggtcacggcatggacttcaaacagcatagctccagtccgcgcttcttttaaccaacacgttcagtagcctttgccgcacataaccagccgaacattccgcaggtactggatgtgtccatcgaatctgggtcggacttgtgctcctgttccgcgcggctggacgagatcagcaaactattggactcgatcgatgagcgtgtgcgacgattggagggcatatactctttatagccttctaagctccctaaaatacaattaaacgtagttaaaattaatgtaccaatcataattaatagcgatccttgataattaaattgtgaaattattaaatatatctgctccactgtatgacgcattttataaaaagcaattgaacaattttagatcc

SEQ ID NO: 42360 - protein, 391 aa, DROSOPHILA
MQGLFRDPALERHFTGHSGGITQLRFGPDGAQIATSSTDSTVILWNLNQAARCIRFASHSAPVNGVAWSPKGNLVASAGHDRTVKIWEPKLRGVSGEFVAHSKAVRSVDFDSTGHLMLTASDDKSAKIWRVARRQFVSSFAQQNNWVRSAKFSPNGKLVATASDDKSVRIYDVDSGECVRTFTEERAAPRQLAWHPWGNMLAVALGCNRIKIFDVSGSQLLQLYVVHSAPVNDVAFHPSGHFLLSGSDDRTIRILDLLEGRPIYTLTGHTDAVNAVAFSRDGDKFATGGSDRQLLVWQSNLHTYDASQFEAKSALASSSCESSGVSSKQSEGSSTSKSNDLSIRIDPRQSLAYQLSEENFQVLDSKHSTQPEKVLGHGMDFKQHSSSPRFF

SEQ ID NO: 42361 - DNA, 3712 bp, DROSOPHILA
taatactgcaagcggcgctggaactggaagccgatacaaatgtatctcgaaagcggcactgcaatggaagagagaataagagagaggagagagaataactcaaaacagtgctgccaagtttcaaaaagatttcaaatctaaatacaaaaagttataattttactattgatttataaattcattaaacggtatatatgtacatatggttttttattattatttaattttccaaaatgagttgggagcaacgaatttcagtatttcttttatttatgtatatggcatttgctgtttagtaaagacatacaccattgcgttagctaagcgaggtttcaatcctcaacaaatgctacacttaaaaaattccaaaatcatatttaattagataaaaattgtgtagctagaaacttgtttataaatatcacgactgctagttagttgtgaaagtaaggtattataattaaaatttaaataataggtaatgttgtaaaaaaaactttaaacgtatagttcatattgggatactgggaatttcaataaaagttatcttaaacatattgtcgtttattcatataaaactttattattattttaattgataacttgggtaataaagtgagtgagcaagtagtctctataaaatacttcttgaggcactaccttctcgttgttatttatttttataagtcaaatcgcagccgaaatttaagaaactgaagccgggttcaaagtatgccgaagtcgggagtatttcactcatagcgcaaaataaacagtcgatcgcagacacacaaatacttgtattacttgccacagcatagatatacagatacttttgcatctacaatcgacgtgaaaaaggtaaacaaaagtcaagtcacggtgcgaatgagtgtgtatttgagatagatgcctcggtgcgagtgctgagttgttggtaacagcgagcgatcgcggcattccagtcagtaacgagttgaatgtggctcaaaacgcgtcgctgaacgatggctaaaaacgtttaaagttaaaaagcgtattaaatcatataatatataatatattggtgtaaaaaatacagaattaaacctaataattaagtgtccggacatcccctagaaaaatgtgtgaaaatgttgagaaactaaccggaatactatgaaaactgctgtaaaacttggctaagataaactcgtttgcaccaatacacatgtgattatacgtataagggcaacgcaaaatactcagactccagaagccagcaattaaaaaagaagttagtcagttagcgtctgggccgcgttactggtgtatgaatcatactttggatacgtttaaaaataacaaaacaaaaaccttaaaacgaggaaaaagttgtaacagtgctaatgtaaacttcgatcaaacttagcggaacgagctcgctacaaaaccaaatacccataacaagtaaattaagcacacattataaaatacctcaaatgtcggtcaggaagttgagtgccctatcgctctccattggtggagttccgttgattccaagtgtttccttggtagctgcggccaatggagagagtagggattgccatggcacgatctgtcatccggtcaatgaattttgctatgttgcaacggagagatgtcatccgtgcatcgaggtctgcaataatcaaacccacaactacgatgcgtttctgtgcgccaaggaatgttcaggcaagtagaattcaaagatttccaaaagattacctcagattaactcacgatccatagggtaatttggcgggttctatgcaagttcaggtttttccagctggacttaattgtatttcaattacagttgcttcagcgggtgattaactcatcacccatgagttgactaaaatagggggtattttaaagatttaaagaatgtacatttttataataaaaatgatttgttgaaactagctttataataatttttttagtgtaaaagatttgtaaaagttgtaatggcaagataaggccagttgcatttgcaatttttatctgactatgtacaacgagttatcaaaaacgttcccgtgttttatcaattattatttacttaaaacgataatagtagcgatattatttaatttctttatcaacccacagcttacaagacatttgagccgttaaaagccgagatgctggacatccagaatacccagcagctgatcctcttgctgctgactatccttctcgtcctgattgcgcttcgttgcgcgtttcagttccttcgatggctgataggcaatcggtgcttccagaagctgatgcgccgtctccaatcgaaggcctaccctcatccggcaactgcaaatggaaaggatcttaatgctaccaccatacagaatctgaatgccattaaccatcccggcagcgaccttgagcgggcacaatcacagatctacagtgtggcaggtaagtgtaaggatctacctgtccgggtttttccaataacacttcccaatgtacacattatacctgcaatgatttattacaggtgctgccgagggttccgttgtgactatgacaacgccggtgagcactcgctatccggcggaaaacagtaccacgcccacaacggttatgacggagatcggatacggatacgataatcaggccatggtcgtaacgccggtttccgagaaaccctcagcagcgacgattcccgtcgctttctaaggccatacaagtacttgaaaactcttacttctaaatcagtccagcgaaagcaaaatgtgcaccacattaaaactagtgatatttttcatagttattaagcaagaagtcttctatcaatatggaatatatacgcatatctgtagaatataaaccttaattaataggtttatatatgttgggacatatttttgataacccaatgtggccctgaaaacttatattcgatctgtatgaaattatatgtaaaggaacttttttctctttactttaatattttccttaaagcaacgaaaatacttacaacatcacaactatgaacgaagagacatatttataactgttaagaaatatatttataatgttcaatttattatcatgttaagttttttatgtggaaaagttttgtaaatggtaatatgggggaaaaccaattcattcgcaatcaccacaaacgtttctcaacacacttccatccggttaaaataattacgaatgcgaaataaatcttcctgaaaattttttgagttttgaaataagacacgggaactacgcttaaaagtattgtcatttattgtaaaaagtattccacgttggcaaacacaattctaaggctaagttaagttggctttttgagtataactcttgttctcgtccttaatgctaatcgtttgtatatgacacgccagatatgtatgtgtgcttgtttccaaactataattaatgttttcgtatataaaatgcttcacttttcctaacgaatctcataaatcagccttaaacgtaagcttatatttaaataaataacctaggactaattccgatcgaattggaaacgcttgtattgatccctttattgcagaacatccttctaaaccttacacccaatactgattccgcctaagtagtggatttgttggcggggccgagggcggtgagctgaccgatccggaaatactttgtggcacagaggcatagccagcaaaatcattcgccatatcgc

SEQ ID NO: 42362 - DNA, 1201 bp, DROSOPHILA
ctgaacgatggctaaaaacgtttaaagttaaaaagcgtattaaatcatataatatataatatattggtgtaaaaaatacagaattaaacctaataattaagtgtccggacatcccctagaaaaatgtgtgaaaatgttgagaaactaaccggaatactatgaaaactgctgtaaaacttggctaagataaactcgtttgcaccaatacacatgtgattatacgtataagggcaacgcaaaatactcagactccagaagccagcaattaaaaaagaagttagtcagttagcgtctgggccgcgttactggtgtatgaatcatactttggatacgtttaaaaataacaaaacaaaaaccttaaaacgaggaaaaagttgtaacagtgctaatgtaaacttcgatcaaacttagcggaacgagctcgctacaaaaccaaatacccataacaagtaaattaagcacacattataaaatacctcaaatgtcggtcaggaagttgagtgccctatcgctctccattggtggagttccgttgattccaagtgtttccttggtagctgcggccaatggagagagtagggattgccatggcacgatctgtcatccggtcaatgaattttgctatgttgcaacggagagatgtcatccgtgcatcgaggtctgcaataatcaaacccacaactacgatgcgtttctgtgcgccaaggaatcttacaagacatttgagccgttaaaagccgagatgctggacatccagaatacccagcagctgatcctcttgctgctgactatccttctcgtcctgattgcgcttcgttgcgcgtttcagttccttcgatggctgataggcaatcggtgcttccagaagctgatgcgccgtctccaatcgaaggcctaccctcatccggcaactgcaaatggaaaggatcttaatgctaccaccatacagaatctgaatgccattaaccatcccggcagcgaccttgagcgggcacaatcacagatctacagtgtggcaggtgctgccgagggttccgttgtgactatgacaacgccggtgagcactcgctatccggcggaaaacagtaccacgcccacaacggttatgacggagatcggatacggatacgataatcaggccatggtcgtaacgccggtttccgagaaaccctcagcagcgacgattcccgtcgctttctaa

SEQ ID NO: 42363 - protein, 239 aa, DROSOPHILA
MSVRKLSALSLSIGGVPLIPSVSLVAAANGESRDCHGTICHPVNEFCYVATERCHPCIEVCNNQTHNYDAFLCAKESYKTFEPLKAEMLDIQNTQQLILLLLTILLVLIALRCAFQFLRWLIGNRCFQKLMRRLQSKAYPHPATANGKDLNATTIQNLNAINHPGSDLERAQSQIYSVAGAAEGSVVTMTTPVSTRYPAENSTTPTTVMTEIGYGYDNQAMVVTPVSEKPSAATIPVAF

SEQ ID NO: 42364 - DNA, 3716 bp, DROSOPHILA
cgatttatcagctcgcctcaatgacgacaacttgttgcatgtttacttgtatttcagttcagctttctgttacagtgtgtcaacgtaaatacaaataaattccggctggaaataacacgcgctaaactgttcaataaaattaaatatttaattaaacaaaatcccataaatattgcaaatggttacacttaagctaaatgtaattaaattacgaaacgttaaatccaattaaaccttatttgatttcgacgatttgatttatcttaaggtcgagtaagcacgtacaatctttttatagtttacgtattttgacccactttctgatagcgaaaagaaaaataagattaggaatgggtaaacattataaaacttgcatgatgttcaggaattgtacgatgtctggaaattaacaccttaatgatggtataatgggagacataccatataaggcgggtaagctaacaagctttctggtccacttcaatattaattgctaattttaaaatgatgaaattaccgtgctgcatttcaatcagattaaattctatgacagaaagccagagaggtgtgttcatttaacggactgagtgtataagtcgctgaatgcgaaaaagaccagatcagatatgaattccatattagttgcgttacagatttaatatttatttatgccaagccaacaaaaaacatatggccgtatgttaggtgttcataaaagtgttgagcttaattaattatactattgtagcagtttccctttcatgtgcagcatattcattttccacctgatcttgcgatccatcaaaccagaaatctcatcaataacactatcatttgcaatcagaatgtgcaaagtaaagtgctttatgtaaataacgaaatcaaacaccgaacataaactgcagctaatgttaatttgacgctaataacgcgactttttaccctactcggcgtactgtttaattgatgttgttaattgtccatgttgatttcaaatcagatggagatgcagctgcagtggaaatgttggatgttgatcttcctgatcggtctgctggaatttggagctggctcccgaatactcttcatgggtccatttccagctccaagtcattggctctggctggagcacttccagaacgatcttctgcgtcaaggacatcatgtgaccagtgtgaataaccatcccaccaagcatccccacgaaaatctgacggagattatcattagtccctcttttgacatacccaaacactgtgagtattatacatatataaatagcatgaaatttaaatacatgacttttattattttagttccgaaggagaacatattttcgatgcagtttgttagcgatttcaacaacctagagctctggtggaccattggactaatgaccacggagcacgctttcaaggatcccaaagtgaagaagctgattgagagcaaagatgatcactatgacttggtcatcatagagcagtttttccatgaggccttcctgatgttcggcaagaggttcaattgtccagtggtcacaattggcaccatgggttatgctgataatatagatcacgcaatgggcattctgacgccttggtccttgattccccatcttctgctttcccatacagatcgtatgacctttggccagcgagcttataatgcctacttatctctgtacgatgcggtcatgagacgatgggtgtacctgcccaaaatgcaaaaattggcagaaaagtatttccagggatcaattgaaggtaagttagcatgagataccttaataaacataaatttatatattacttttgtttcgttaaaggacctctacctaatgttcttgacttggagcgaaatatttccctagtcctgattaatgctcaccgtagtatcgatcttccgaggccaagtatgcccggactcattgacgtgggtggggcgcacattcagaagcccaaacaactgcccactgacctccagaatttcctggataatgccacctacggagtgatctacttcagcatgggctcctatgtaaagagcactgatttaccacaggagaaaacggcgctgattctcaaggcattcggccaactcaagcagcaagtgatttggaagttcgagaacgattccattggtgatctgccctcgaatgtgatgatcaagaaatggatgccccagaacgacattttggcccatccgaatgtcaagctcttcatcacgcacggcggtatttttggaacccaggagggtatttactggggtgttccgatgctgtgcgtacccctgtacggggatcagcaccggaacactattaaatcggtgagggagggctatgcccgatcgctggtgttctccaaactcaccactgatgacttggtgcggaatatcgagactctgatcaacgatcccccagtacaagcgcagtgctctggaggtatcgcagcgattccgcgataatcccatacatccgctggacgaggccaccttctggatcgagtacataatccggcatcgtggggcgcggcatctgaagtcccacggcgccttcatccccctgcatcagtatctgctcctcgacgtcttgggttgcctgttgctgggcgcatttcttgccatctggctgccatggcggatgatcaggagggtgcacaagtggtggctcaaaggggaatcctctaacaaactgaacgagggcaagaagcgattgtaggagaaggctatctctcaactagtcgccgagattatttattgtgatatatttttagatcacaaagttgacaattacacgggctgattgttgcttctcaatttaatgttttcaattgatatacaaatgtataggatttaataaaataaaaaaaataaaaataaatatatgtaaacatattatttaactgagttgctacaaagtatgcaattactttctgtctttcattagtcatattttaaaaaaaaattttatggcattcttattgggggaaaacaaatgtagagtaaaatgttattttacggaaagttatgtagaattcggcttcgacgaaaacacttcgtttgagttaagcgggtgtaaggttttaaatgttttgattttactacaataattcaaaaatgttgtgtaccagccgatttcataacatccatgtccatccaatatgtataacatccataaataataaatacataaacactataaatttttaaaataaaatgagaagtttttagaagttaaaactttaccacgtttttgctaaaacgatttttcaatgcataatagaataaagttaaaagtaaatttatgtttgaactttgcccgtactcaaagaactattaagaccaattatttaaatctttttttttattaatgaattcgtgaaatagtcaaatattgcaaaaaacataaaatgccaataaatttcctaaagctgaaagtgttatgtttgttggcggctcaatcacgaagttgtagacattcttgaatcccataaaactcccacacacagcacgtttggtggattatggaaaacaaaattaaatatatgcagcagttaatggtaaagtggagaacaaagaatggcaacaacaaaattcggaaattcggtctgcaatgcattctattaattctttactgctaaacctctagtttcaactaaattaaaattattaaatgtttaaaattgaatgcttggtactttcaagtttattggaaatat

SEQ ID NO: 42365 - DNA, 1500 bp, DROSOPHILA
atggagatgcagctgcagtggaaatgttggatgttgatcttcctgatcggtctgctggaatttggagctggctcccgaatactcttcatgggtccatttccagctccaagtcattggctctggctggagcacttccagaacgatcttctgcgtcaaggacatcatgtgaccagtgtgaataaccatcccaccaagcatccccacgaaaatctgacggagattatcattagtccctcttttgacatacccaaacactttccgaaggagaacatattttcgatgcagtttgttagcgatttcaacaacctagagctctggtggaccattggactaatgaccacggagcacgctttcaaggatcccaaagtgaagaagctgattgagagcaaagatgatcactatgacttggtcatcatagagcagtttttccatgaggccttcctgatgttcggcaagaggttcaattgtccagtggtcacaattggcaccatgggttatgctgataatatagatcacgcaatgggcattctgacgccttggtccttgattccccatcttctgctttcccatacagatcgtatgacctttggccagcgagcttataatgcctacttatctctgtacgatgcggtcatgagacgatgggtgtacctgcccaaaatgcaaaaattggcagaaaagtatttccagggatcaattgaaggacctctacctaatgttcttgacttggagcgaaatatttccctagtcctgattaatgctcaccgtagtatcgatcttccgaggccaagtatgcccggactcattgacgtgggtggggcgcacattcagaagcccaaacaactgcccactgacctccagaatttcctggataatgccacctacggagtgatctacttcagcatgggctcctatgtaaagagcactgatttaccacaggagaaaacggcgctgattctcaaggcattcggccaactcaagcagcaagtgatttggaagttcgagaacgattccattggtgatctgccctcgaatgtgatgatcaagaaatggatgccccagaacgacattttggcccatccgaatgtcaagctcttcatcacgcacggcggtatttttggaacccaggagggtatttactggggtgttccgatgctgtgcgtacccctgtacggggatcagcaccggaacactattaaatcgtacaagcgcagtgctctggaggtatcgcagcgattccgcgataatcccatacatccgctggacgaggccaccttctggatcgagtacataatccggcatcgtggggcgcggcatctgaagtcccacggcgccttcatccccctgcatcagtatctgctcctcgacgtcttgggttgcctgttgctgggcgcatttcttgccatctggctgccatggcggatgatcaggagggtgcacaagtggtggctcaaaggggaatcctctaacaaactgaacgagggcaagaagcgattgtag

SEQ ID NO: 42366 - protein, 499 aa, DROSOPHILA
MEMQLQWKCWMLIFLIGLLEFGAGSRILFMGPFPAPSHWLWLEHFQNDLLRQGHHVTSVNNHPTKHPHENLTEIIISPSFDIPKHFPKENIFSMQFVSDFNNLELWWTIGLMTTEHAFKDPKVKKLIESKDDHYDLVIIEQFFHEAFLMFGKRFNCPVVTIGTMGYADNIDHAMGILTPWSLIPHLLLSHTDRMTFGQRAYNAYLSLYDAVMRRWVYLPKMQKLAEKYFQGSIEGPLPNVLDLERNISLVLINAHRSIDLPRPSMPGLIDVGGAHIQKPKQLPTDLQNFLDNATYGVIYFSMGSYVKSTDLPQEKTALILKAFGQLKQQVIWKFENDSIGDLPSNVMIKKWMPQNDILAHPNVKLFITHGGIFGTQEGIYWGVPMLCVPLYGDQHRNTIKSYKRSALEVSQRFRDNPIHPLDEATFWIEYIIRHRGARHLKSHGAFIPLHQYLLLDVLGCLLLGAFLAIWLPWRMIRRVHKWWLKGESSNKLNEGKKRL

SEQ ID NO: 42367 - DNA, 15081 bp, DROSOPHILA
aaggatacaaatcatagcatacatcatcggttacaatctctttggcaagactccgtcgcacctctggtgacaaattccacgcccggtgaccaacccgccaaataagcgctaaaaataaaaagatacatagccaggagaatagctagcaacacatatataaatataacgaatatatttatttaatatatcacacaacaaattcgcaaaacgtgccaaatataatttaaatctatttattttgtttaacaaagagctaataagtctaaagtaaatataaaatagttagtcgtttaatttaaatcctcattaaaagccacaacaaaaggaagttgccgaaggagcagccgttggcttcatcatgaggaagccagaaatgctgattagtttaattttatggtgagttgaaaattcttaattagtatttaatgtgtgatttgtccgaaatcaagatatctattgtttttatttttttcttaaattcatagtcatatttattatcagtaacccattcgctttgaaaaatcctgaagatgtggcctttgaaggtttgaaccttaattcaaatgtgttattatatctgtgattcagtgtccgcaaattttagttaatttgtgttttgtcactccctcggttgccaatttaattgcgagaatatgaaaatgttgtcttaaatatccggccttagaaacaagtttcttggcatattttgaagtagaaacttagctgcatttaacccattatttatgcatcaactccgaacattgaagctttggccaaatggccggcctactacaacgagccacaaataaaatacagatggccattaaagtaaattatagtttgtaagactatacatacaatttgactgttttgtcgggccaagatcatcattaatcatgaattttctaatcgactcgcgttggacaagaagcgtcaacggaagtgagagattgacagagtcggtcggcttatcaccaagcgattcgacttccccgttttaatggtccttgaggcgttcgtttgttaactctataaaaaatcaaaaacgattttcaagaattaacatcatgacaaaaagatgaaatcggatgattatatcttatgtctacatatgaatatttatttatcgaggcgcgatcaaagcggggcgatcatgtaatatcgattcgaattggatttctttgctcaccagtgaaaaatcaatttgaaaagtttcactttcatttttccctctcttgactgggaagatgccaaaacaaatcggagagaaaaagttgtcagtggcggcaacaaaagactctttcgctttttatgtttgtgtgtcgtgccaggtggtttttggaacggttacacaatcatcactttattttcgttttcagtccacctcttttcggttttgtgttaaccgcattgacataattttcagcgtaggcatcaaaaaaaaaaaaaaaagaaactgaagcataaaactttacataatttgcaggcgtatccgattcataggcctgcaattaatctggctttatcgatgaagacgctcagagcagcagagcctagttttaattaacagatttatttcttgtgcgagtttaacaggcggccgctaagtgtagaaagtttcctcctatctccgctcgcattaatttggcgttttgtgttaatcagtgtgtgtaagttatgcaaattggatcgtggcattagcagttcgcttatgcaatgtattggataatcccctccccggctggcgacattggtggaccaggccaggctcaccaggttttctattttcgaggccttggccagatgcgacttctttggcttagtcatgcggcgacgctcagaatgcagccgagcaacttgattgctcaggcaaattaagcacaagtgctgccgattgccgactgcgctgccagatgctgacattgtctagttgacacacttaagtcacttaaatgtcgtagaattcttgctaaaagttttcccaagtgttttacagcatacaaacattttttttaacactttttgacatttttctatcgactgtggcgtcaaggcttggcgccccctaatgggatgtcaccggctcaccgaatgcgacaaaattatggttattcataattgcgatagtcgcaagcaacatttttcggtgaattagagcactcgcgtgggtcgaaacgaaagacttaggaagcgaacttgaaattacaattttaattaaagcttcaacggtagcaatgccaagggggtgtgggttgaaattgtgagatgacatgattttacacgtgcctaagaaatgagaaaatgtggaagggccaagaagctatgaaattgagcaaaagatttatttcccataccatgataattattatgttcataccattatcatttaacaaatcccaaaaaatatttcaaaaacatagataatggcattaaaattgctgggttctaactctaatctttaatcagattttaagatatttatctctctaaaaccaaacatgatagtttaaaattgttcaaaatattaatgatctaatttattttggatccaacaattccgcatcttcacatagttcttcaatcccactttaagtgttgtcactgtcattaatctatttcacagaaatccattagcacctttccaaaagggaaacttaaatttaaattaactttagcgccgcctcttcgtttaacacatttttgtgaagaaaattagtcaagacattttttttgctggctagaactgttttaaagtcaattagccaacgtgtatatgataaataagtaattaagagagaaaaaacagaacggcgagttcaaggctgaaacgatatctgaaaccgaaaccgaattctcttagtcgagaattcgttattttatgtgtttttgtaatttaatttgcaagttttagccgtctttcgatgggctgtcatttatcatatttatttcatccgttgtttgctgtgtctaagacacgtttttttatttatgtatgtccatgtctaatttattgactaatttatcaacatttgtctgggctggggatccaacaccgaaagttgatccagtgaaaagttgaataaacctttttgacatgtgactgtcgcttgatggccgagaattccttttctttctcggccttcctggtgaaaggagatcaaaactagagatcgctttagttgctgaccctgagagagcacgtataactctgtcgttggccaattccaagtgattcgataaatcaagatccgttgctcaacttgttttctgctccgccaagaataattcaatgcgcacaaatatttctgcgagtgtccaactctggcagcgcctgtctgaccacttcgcttatttctacatacatgactccaaaaaacgggttaccccaaataaaataaaagtataacgaccaatatgcatagcagctggatcaagaaaaaaatctcaaaggaacgggtgccaattgtcttttcaatacatgtagctggtggtctctcccttcaatacacaaaaatgtgctacattcaaccgcaaacaatatacaaaaattacatccatgcatacatcttgttagcgactggtttatttgggttaaaaagaaattttttggatgcgttcgagctcccctctttcaaaaagataacggaacaagacatctgtgaaaaaaatcaaaaacccataaacaaaatctgaagcaaaatgccaaacacaagaaagtgaaacttttgttgctgccattgtacgacgtaatcaacttcaacaggatcaagtggccaacaggcttgactgggcctcattttttcgggttttcagtaatttcgctctccagcaacggaactaaatatttgttaatgtgtctagctcttcaaatgaagtttaaagagccttttgaggtttttgcttttggcacttgcctgcctgatagcaactggcatcttccgtcatttcaaggcgctacaactggttgtcatcttacataagtcgaatgaggatgggtgaaatatgatgattatgatcagcgactaaatatatgaattttttaatttaaagcacggaacttatggaacaaggggctggggtcttgttttgttttgtgccttattatacatactcaatacaatttagataaatttctgtcccattttctgtctgtagattttcatcttggtttccataaacaagccttcatttaactttctcacatttcaccttaaattgcccgaaaagatttcacagcatttggctgccggggggaacacaaagcaattttttaccataaacaccagggtgcgttgtcaatcttggtaaattacgcgtcaaatatttgtaaattataaacgatcatcttggcgttgtcaacataaaacgccgattacagagttttaggcctgaaattggatgattatattttcccttttgcccgattgggtggcagttggccaacaaactgcgaccttggcgtttaaccggtaaccgactgacatttgatcgtaaatcaaatgaaaacttccaacgatttgcatgcaggcaacaccctgtaagatatggagatacgaggccaaaagctgctcttcgaattatttaccaatatcaagttgtatgcactttcgcaatgaaaacgaaagttacgccccgctattcgaatattcgtatatccatatggctgtctgcggcgcgtgactttgccaacgtttacactttcttgccataaaaagcaacggccccatgaggggacacacaccggcatagaattatgatcttcacgcctcttggctggcgttcaagcaacgttcaccagcagccagcagcatctgcggcaactacagacttggcaatgtaaccaatattggaagccacatcgatgaacgtcactgaaaaaagaagtaaacatgaaaattgcatcatgcctgcactcgacgttcgtgtgtcgctggtgatgatcatcaaagttgccaatgaacatcgttatggtaatgaagtgcacttgaaaatttctgtgtgcagatcttctgtaggttttttcatgcatatttcctcatccgtccaagaaagagccatacaaactgggtaagagcgtaatgtattcaatcatgagtattttcatagcctgttgtctagttttcgggccggtcgactcctacccattgtgcaatgttcagagccaagaaactggctgtgtaataaacacaacaaaaaaaccacaaacccagagtgaaacaaaaagtgtttggggagtgtattttgctgatcacatgaccatcacatgattgcaggagggtatgcgaatctattttagctgtaataaaaatttcaacctgctaagcaggatgttgtgggtatttttgcattggtgaaatatattaataaatatcttatctgatcattatcgtattgatttcaaagaaggaattgaattattttccatgtttcagaattctgaaaatacttgagctagctgattatttaagttttgtcagtagagtatgcaggactcgacttttgtggaaaacactttcgctttcttgtttgttccacgcctttgtggtagtatttactgctgtcgctggcgttgctgattttcctgttgcctgtgttggtggtaggaaatcatgtgcaaagtcacatgacgatgacggtacgtgcctttggagtaattgcagaaacacatggatgccaggggtgttgccagccgtcgagaagcgtgcaaaatacggatgaagatatatacaggcgattcgtacatatgtgtttggtcggcccgtctgcatatttggccaggcggcagcactgcggactgttgataatgaaaacgacgtcaaacgggcgttcgcatgagtaatgcgcataccaaacacttgatggcttccgcaattgtgttttttttttttgttattattgctggctagtgccacactaacccatttgtgtaagccttcttcgcaggcgtaagtaatttttgtatcggctgctgttaccagtgctgcatgatttggcaattggcagcgagtcaagtttgttgcctaagtcttttgttttcccgctgattgcgcaaagcgattgtgttcggatattttccgcttctaagtattcccgagccgcttatgttgacgcacagtgttcattcgtgtgtgggtagtgagtgctttatctaaggccacttaactcatgatttgcacagacaattaattcgtgactctcaattgcgcagagctaccgaactatcagcacttgcaaattaaacatacatcgcttatcgacatcaccgggaatttatgcaaatcgcaaaatagcataatatccaaccagctagcgcgttgtgcaatatttatttaataagtcaaattaacaacgatttattgcttgcaattgtgatgggttttatgaaagctgcttggttgcttcgctaaagtcaactattttaggactggcacgcgttcgtcagctattttgtgcaactggtttgacttgttggatgtgccatttggtatttttacagttcttactcacgtgttttataattgccaatcgatcgagagaatgactaactaccgattgtaaaacggctgtaaacagaatgcaaataccacaagctgtcgctgacaataggtacatgcatctgagtattgagactcaatcaatatataaaaccaattaccccgaaatatgttgatatgaccgatgatcaagtgtgatttttacgaggaatttgactcaacttaaattcagataatttttttggggattaccatactggctgctgtttccgtttgccaactggttatcagaacaaatcaaatgaatgtcaaacaaataaataaatttcgccaaaaacaacttgaagtaacatatacgcagatcagaaaattttgaaatgcttaaaactacctaaaaacaatctctgctgccgtttgccaatggactgattgataaactccacacgaactttccttttcaatatttattgtatttaattgttggatttcagcaaacgacgctcgataaaaataaaaaagaaatgctaactattgatgtcataatgttgttaaataacgtatatgcggcatgtgtcgtgcatttctatttgctttttaacgctattttattttttttttttgttttgtttgtttggtttatgggtgccatcagtggcgaggcatgacacacatttttgcatttcagttggtgacataaataccagacgacccgctccatgccgcataaaagccataaacaaacaaatgtaaattgccagcacttctgctttcgctttcagctcggtttcggtttcggccaagttattgagatacgtgtcggcagtcaagttctgcaaaagtacaactaaaggggattactcgtgcccggcaataaattaacttatgtgtgccaattgcctgccgtccgttgcctgcatattggccaatcgttatggatttgactggcctcaatgggcagccacgcacctggcaaatgggtaatcgcattacgagttattttcggtaatcgttacttcatttggcatttccttttttatgccagaatcgcaataatgaattttgttttgtaatgggatttcattgatggcgaataaatgatagaggcttgtgacccaaattacctcctaataaccaagattatgtgtccaagatggtacatcttatttatcttaaccatgaaaactccatcattacccaaacatttcctgcgttttttcacaaacaacatcgatttatgtggatcttgaactcaagacaagttcatatacccaaacgtagctatctcgaaacattataatcgtctggaatctgtttagatagacaccacaagcggtcacttaaaagttactaatcatacaatagccttgaacattcgtctaaacaacccgaacgaaataccacaaattacgttcaacttttaaatgagtgctaaacaaaatatatgtgtgtataactcaataaaataagcaaaaataaaaccaattaaaccgaaaccagaaaggtaactctgcttgaatatcatttaggatcagcggagtttggcaaaaatttatgtaggggaaggtgaggacgtttacccaaacaccaaattcagcggattcttaaagcggatcttctacgcccacatccaccagattgcagagtgttgcataatcgcggatctagacgtcaggggcaagcacataaattgcatattgttgctgttgacaaaagacttcaattcggaaattaatgtcaatgcaaccgaccacaaaagaaactccgtcacgtgagccgagacggctggccgaaatcaatagaatagcataatgacaggccaacgaagtgcggcttaataagccattcagtcagccattcagtcagtcagtcaataagtcatctatagccatttgggggcagacagcgtcattgttcataattcaaaattgattagttcgacagtcgtttctcatatccggttagacagaaaatcgcagacctacgcctcctctattaaatagctttttatatgcatagtttcagtttcagttttttgttgtctgtgccgcgtttgatgaacagtgtgagcaaacgatggcgatgtgagaaaacttgtaattaaatgccggaaaatgcgatgcgatcccatgaatgagtgaaacggagactactctgcgcaaattaaaaacacgtgattaaagcttttgggttaaacctatttgtgataacaaagtagcaggaaaaacctttaaacttctgagtaaacccaaaaggattgctatcattcagttaaaatcagtttgtgtttgggaattttatcagcagaaaaattccgtgggttgatagttgttttgatgagtcagcaatcacctaaagtctgcttatcggcaagcttaattgtattttattcatcagacacttgcattttttcggttgcgatagtattttattaccataaacccgaaaccctaaaatcgttttttgtgggttattataaaattatatgaaagtgattaagctatctttcaatggccaaataaatagtgttattgttttccattattttccaggtgcctttgcgcttccagtctgacactccgtatccccgaggaccttgagaatgccgccatcaatgccctgagctccgaacgtgcccgttccctgaccccttgtggatcctccgcggaggcagagggcagtgtggccggtgactatgacgtttgcccgccgagcaagtaccgccagccaacagctgagtgcaacaacgtctcccaccgaaagtggggtgcccggggagatatcttccagcgtctgctggctgctgattatgccgatggtgtgagccagccgaggacctccaagggaacccatgctctacccgatgccgaggtggtgatcgagcaactgcagcgccatgtggaaggcgagctgcgccacgcgcacatcactgccatgctgcccgcctggggtcaactgttggccaatgacctagtcgaggtaggacagcttcccatctccggaaagtgctgcgagcgcgactccgccgtcaaggatcccagcgagctgcagcactgcttcgtacgggcgggacccgactgcaaggagtacaagcgatcggcaccaggattcgatttggaggcgtgtcagaagcgtaagcttaagaggctccagaaaataggtattctgtgtacaataaatatggttccattccattacagacactcgccagcagatgaacattgcctcggcctacattgatggctctggactgtatggctccacgcgccatgaattcgaccagttgcgcacctacatcagcggtggtgtaaaggtggagtcctgcaagtactgtcaggtggctggagccactggagcactgcatcgagctctgcttcagcagcacaacaacatcggcgagcggctgtcgcacatcaatcccgattggtccgaagaggacgtattcctggaggccagacgcatcatcacggccaccattcagcacatcacctacaacgagttcttgcctttggtcttgggacaggaaaccactgccaaggagggtctgagactgactgccgagaagcactcgagcaactactccagctcggtgagggggggaatctacaatgagttcgcaaccgccgccatgcccgctttctggagcatgtatccaccagagatgctggccaagaagatgtccgcccacgagctgctgtctattgccgccctgcagaagtcactggttccgagtcaaacgaatgccgagggttggtccgagttggctctggccgtacatcgcggtcgtgaccacggagtggcatcctatgtgcatgcccttgatctctgcgagcgtcgattcgccgaccaaagcgctgccaatgtgagcttcgatactttagcccaggtttccaatattcccgaggagtacatcaccaatctgcgtgacatttaccagtgagtttttatgactttgctaaatggtgaaaccttaatttatggtagaccttttaaataccggttagcttcggtctttggaactctcaagtgaactgatctaaatgcacgccaagaagtatttaaaatatatatttaaatgtcaatgaattgaattgccttatgtaaatttgaaatatgtataatataaaggggtttatccaaccatttttattatttgttattacaagttgttgaatgttttgtccctttccagaaacgctaacgatattgacttgttggtgggtgctcttctggaagagcctgttgttggagctctctttggacccacaattagttgcttgctgagcttgcaatttgagcagctcaaacagaccgatcgtttctggtacgagaatgagattccgccctcgtcctttactctggatcagctgaaaagcattcgccagacgactctgtccggattgctgtgtggttctcatcaagtgagcaccgcccaatccaaggcttttattctggaggacaattatctgtgagtatctgatgattacacttgaatgtctgatattctagaggttcatatctttataggaattccattttggactgcgaccagctgcccaagtttgatctaaaaccctggcaagtaaaccctgaagatgaagtgcatgttgagcacgttgaggtcgaacccgcgactaaagaagccattgccgaactgagtcccgaactcattgaggctgctgtggagcgtgccaagcaagaattggaggaacgcaagcgtttcgagtacgaagtgtggcgtacaagtaagttctatacggtttttaagtgtccctgtgatttaaactaactcaaatcctgtctccttcacagagggtggcatcagcgcccgatctcctgacggcacggctgcctccttcagcaaggccaatttggctgccctgaacttggccaactcgtccctgatcttcgagctgacctccaacgagattgtgaagaccctcaaccacataaccagacgcaagcgtcagatcttcaatcctaaccagaatgcatttaatcgcaacgaactgaccgataccctgcaaacggtggacataagtggactacttggtggtgcccagaagcaacttgacacatgcccggaacccagtcaacagtgcgatgcgaactcgccgttccgcactctctccggaaggtgcaacaatctgcgtaatcctaactggggcaagtcactgaccactttctcccgcctgctgcccgctcagtatgaagacggcatctcggcacccagattgactggagtaactggcaccgcattgcccaatcccagaaccatttccactacaatccatcctgatatttccaacctgcacactcgctattccctgatggtgatgcagttcgcacagtttgtcgaccacgatttgactttgaccccgatccacaagggtttccacgagtccatcccaagttgccgaccttgcaactcccgccagacggtgcatcccgaatgtaatcccttcccagtgcccgctggcgatttctattatcccgaagtgaatgtgaccagtggcgagcgtttctgcttcccctcgatgagatcgttgcctggtcagcaatcgctgggaccccgtgatcagatcaatcagaacactcacttcctggacggttccatggtgtatggcgagaccacttgtctatcaaacaagcttcgtggattctcaggacgcatgaacagcacccaagtgaggggcaaggaacttttgcctctgggaccccatcccgagtgcaagtcccgcaacggtctgtgcttccttggaggcgatgatcgtgcttccgagcagccaggtctgactgccattcacaccgcctttctgcgtgaacacaaccgcatcgttgagggtctgcgcggagtgaatcctcactggaatggagaacagctcttccatcatgcccgtaaaattgtcagtgcccaagtgcagcatatcgtgttcaacgagttcctgccccgcattctcagctggaatgccgtcaatctgtatggtcttaagctcctgccccaggggtactacaaggactacaacccatcgtgctctccgattgttttcaacgagtttgcggcagctgccttccgtatcggtcactctctgctacgtccccatattcctcgtctaagtgtccagcaccagcctgtggagccgccactattgctacgtgatggtttcttccgcatggatgccctgctgcagcctggaataattgacgaaattctgcgtggtctggtggccactccaatggagaccctggatcagttcattaccggcgaagtgacaaaccatttgttcgaggatcgcaagattcccttctctggcattgatttgatcgccctgaatattcagagaggtttgtttttcctactacatagacatttatgtaaataggagatgttaccattatcgtttttccctccagctcgtgatcatggaataccctcgtacaacaactaccgagccctttgcaatctgaaacgcgccaccaactggaacgacttgagccgcgagattcccaccgaggtcatcaaccggttccagaagatctacgccagcgtggatgacattgatctgttccctggtgccatgactgaacgtccgctgcaaggcggtctggttggacccactttggcctgcatcattggcatccagttcaggcagctgcgcaaatgcgatcgcttctggtacgagaatcagaacccagaggtcaagttcacggaggctcagctggctgaggtccgtaaggtgacgctggccaagatcgtgtgcgagaacttggagatcacaggagatatgcagcgtgctgcctttgatttgcctagcaatttcctgtgagtaaaaccagaggcttctgagaattacttagcaagataattaattttcacaactaatttcatagtaacccacgtgtgccctgcgcctcgatgccccagattgacctgaatgcctggcgcgaaaatgtccagggttgtcagattggcaaccgcaatgtccgagttggagaatctgccttcccatcaccctgcaccagttgtgtctgctccgccgaaggagtaagttacatggtattcgcctaagggaatattattctaaatgctatttttccacttgtaggctcagtgtgcgtctctgcgcatcacggattgcggccagttgatcaggcagtggcccaaagaggctattctccgtgacgaggtgtgcaactcgcagtgcggcatttatttgactggtcagcaggccagtggcttcaatccccaacagcgacagggtcaggctcagccacgtgtgacccgatcccgcaatcagaatctcttcaagttccccgaccttacgcccttcattgcttccctgtaagctggagggcactccaccctgcaaagtggaggacggagtgaatcatcaactttgggtgcggagtaagcagaagctacaaattttgagacgcattttgtaaataaatcttgcgtttgtacataagtttcattgttaattgcttacctaaagacttgtttgtcaatgcatgttgtacacgacataagatacaaaacactcggacgcatcatcaaacacttgctactcgaagtgttctagttatatcctaattaaaattacaatataactattaacaaattataataaacgctttatgtgagtgaaataatagtcacgcattgtttcttctgtgaactgggaacttaagcattgaaaactccgtttttaggtattatgttgctttatttagttttgccttattgaacatggtccgttacagcaaatagtttgtgtattttcgataggtttctctataatgccgacaataaataacaaaactcacaaagtacaatctagtctaaagaaggattacatgaatttatatagacgtatctgcaactgtgtacgagcagttggtcccagtggcacgaagaacgttagacgtgctgttgccacaagaatacatgctaccaagatggtttgggttttgcacattgggccagcccatcagggccatcaagtacatatgcagatacaaatacatttcttatcatcgcataacattacaattatttaaattcgaaaagagcgcagcgacggggaaaatcaaagcgctaagtgttggttttgttttctttttaccggttgcaggtgtattatgtatgggtgattattacaatctaggctcgcgatcggatcggtttctcgttacttgacagctaacatcatcactaagcggttggttaatgctactaaagttagacttttggtacccatagagataattcaactaacgtttacagttatacagtgttatcgtactcgaatatgtatctgtttcgcggacattacaatacttttatccttgctgtgttccataaaaatgagcgtaacttgcaagcgaacgacaattaaagagtccactactctgccatttttggtaagatttttcttttcatttgttttgttttgtttgtttcttttgttggttggtgcttaaacatctagaaaatttgacttctttgcattatcattaactaacgctgacgatacgaactaaaaatttaagttacaaacacacacagatcagaatatacacatacata

SEQ ID NO: 42368 - DNA, 4702 bp, DROSOPHILA
atggtccttgaggcgttccaacgttcaccagcagccagcagcatctgcggcaactacagacttggcaatgatcagcggagtttggcaaaaatttatgtaggggaaggtgaggacgtttacccaaacaccaaattcagcggattcttaaagcggatcttctacgcccacatccaccagattgcagagtgttgcataatcgcggatctagacgtcaggggcaagcacataaattgcatattgttgctgttgacaaaagacttcaattcggaaattaatgtcaatgcaaccgaccacaaaagaaactccgtcacgtgcctttgcgcttccagtctgacactccgtatccccgaggaccttgagaatgccgccatcaatgccctgagctccgaacgtgcccgttccctgaccccttgtggatcctccgcggaggcagagggcagtgtggccggtgactatgacgtttgcccgccgagcaagtaccgccagccaacagctgagtgcaacaacgtctcccaccgaaagtggggtgcccggggagatatcttccagcgtctgctggctgctgattatgccgatggtgtgagccagccgaggacctccaagggaacccatgctctacccgatgccgaggtggtgatcgagcaactgcagcgccatgtggaaggcgagctgcgccacgcgcacatcactgccatgctgcccgcctggggtcaactgttggccaatgacctagtcgaggtaggacagcttcccatctccggaaagtgctgcgagcgcgactccgccgtcaaggatcccagcgagctgcagcactgcttcgtacgggcgggacccgactgcaaggagtacaagcgatcggcaccaggattcgatttggaggcgtgtcagaagcacactcgccagcagatgaacattgcctcggcctacattgatggctctggactgtatggctccacgcgccatgaattcgaccagttgcgcacctacatcagcggtggtgtaaaggtggagtcctgcaagtactgtcaggtggctggagccactggagcactgcatcgagctctgcttcagcagcacaacaacatcggcgagcggctgtcgcacatcaatcccgattggtccgaagaggacgtattcctggaggccagacgcatcatcacggccaccattcagcacatcacctacaacgagttcttgcctttggtcttgggacaggaaaccactgccaaggagggtctgagactgactgccgagaagcactcgagcaactactccagctcggtgagggggggaatctacaatgagttcgcaaccgccgccatgcccgctttctggagcatgtatccaccagagatgctggccaagaagatgtccgcccacgagctgctgtctattgccgccctgcagaagtcactggttccgagtcaaacgaatgccgagggttggtccgagttggctctggccgtacatcgcggtcgtgaccacggagtggcatcctatgtgcatgcccttgatctctgcgagcgtcgattcgccgaccaaagcgctgccaatgtgagcttcgatactttagcccaggtttccaatattcccgaggagtacatcaccaatctgcgtgacatttaccaaaacgctaacgatattgacttgttggtgggtgctcttctggaagagcctgttgttggagctctctttggacccacaattagttgcttgctgagcttgcaatttgagcagctcaaacagaccgatcgtttctggtacgagaatgagattccgccctcgtcctttactctggatcagctgaaaagcattcgccagacgactctgtccggattgctgtgtggttctcatcaagtgagcaccgcccaatccaaggcttttattctggaggacaattatctgaattccattttggactgcgaccagctgcccaagtttgatctaaaaccctggcaagtaaaccctgaagatgaagtgcatgttgagcacgttgaggtcgaacccgcgactaaagaagccattgccgaactgagtcccgaactcattgaggctgctgtggagcgtgccaagcaagaattggaggaacgcaagcgtttcgagtacgaagtgtggcgtacaaagggtggcatcagcgcccgatctcctgacggcacggctgcctccttcagcaaggccaatttggctgccctgaacttggccaactcgtccctgatcttcgagctgacctccaacgagattgtgaagaccctcaaccacataaccagacgcaagcgtcagatcttcaatcctaaccagaatgcatttaatcgcaacgaactgaccgataccctgcaaacggtggacataagtggactacttggtggtgcccagaagcaacttgacacatgcccggaacccagtcaacagtgcgatgcgaactcgccgttccgcactctctccggaaggtgcaacaatctgcgtaatcctaactggggcaagtcactgaccactttctcccgcctgctgcccgctcagtatgaagacggcatctcggcacccagattgactggagtaactggcaccgcattgcccaatcccagaaccatttccactacaatccatcctgatatttccaacctgcacactcgctattccctgatggtgatgcagttcgcacagtttgtcgaccacgatttgactttgaccccgatccacaagggtttccacgagtccatcccaagttgccgaccttgcaactcccgccagacggtgcatcccgaatgtaatcccttcccagtgcccgctggcgatttctattatcccgaagtgaatgtgaccagtggcgagcgtttctgcttcccctcgatgagatcgttgcctggtcagcaatcgctgggaccccgtgatcagatcaatcagaacactcacttcctggacggttccatggtgtatggcgagaccacttgtctatcaaacaagcttcgtggattctcaggacgcatgaacagcacccaagtgaggggcaaggaacttttgcctctgggaccccatcccgagtgcaagtcccgcaacggtctgtgcttccttggaggcgatgatcgtgcttccgagcagccaggtctgactgccattcacaccgcctttctgcgtgaacacaaccgcatcgttgagggtctgcgcggagtgaatcctcactggaatggagaacagctcttccatcatgcccgtaaaattgtcagtgcccaagtgcagcatatcgtgttcaacgagttcctgccccgcattctcagctggaatgccgtcaatctgtatggtcttaagctcctgccccaggggtactacaaggactacaacccatcgtgctctccgattgttttcaacgagtttgcggcagctgccttccgtatcggtcactctctgctacgtccccatattcctcgtctaagtgtccagcaccagcctgtggagccgccactattgctacgtgatggtttcttccgcatggatgccctgctgcagcctggaataattgacgaaattctgcgtggtctggtggccactccaatggagaccctggatcagttcattaccggcgaagtgacaaaccatttgttcgaggatcgcaagattcccttctctggcattgatttgatcgccctgaatattcagagagctcgtgatcatggaataccctcgtacaacaactaccgagccctttgcaatctgaaacgcgccaccaactggaacgacttgagccgcgagattcccaccgaggtcatcaaccggttccagaagatctacgccagcgtggatgacattgatctgttccctggtgccatgactgaacgtccgctgcaaggcggtctggttggacccactttggcctgcatcattggcatccagttcaggcagctgcgcaaatgcgatcgcttctggtacgagaatcagaacccagaggtcaagttcacggaggctcagctggctgaggtccgtaaggtgacgctggccaagatcgtgtgcgagaacttggagatcacaggagatatgcagcgtgctgcctttgatttgcctagcaatttccttaacccacgtgtgccctgcgcctcgatgccccagattgacctgaatgcctggcgcgaaaatgtccagggttgtcagattggcaaccgcaatgtccgagttggagaatctgccttcccatcaccctgcaccagttgtgtctgctccgccgaaggagctcagtgtgcgtctctgcgcatcacggattgcggccagttgatcaggcagtggcccaaagaggctattctccgtgacgaggtgtgcaactcgcagtgcggcatttatttgactggtcagcaggccagtggcttcaatccccaacagcgacagggtcaggctcagccacgtgtgacccgatcccgcaatcagaatctcttcaagttccccgaccttacgcccttcattgcttccctgtaagctggagggcactccaccctgcaaagtggaggacggagtgaatcatcaactttgggtgcggagtaagcagaagctacaaattttgagacgcattttgtaaataaatcttgcgtttgtacataagtttcattgttaattgcttacctaaagacttgtttgtcaatgcatgttgtacacgacataagatacaaaacactcggacgcatcatcaaacacttgctactcgaagtgttctagttatatc

SEQ ID NO: 42369 - protein, 1485 aa, DROSOPHILA
MVLEAFQRSPAASSICGNYRLGNDQRSLAKIYVGEGEDVYPNTKFSGFLKRIFYAHIHQIAECCIIADLDVRGKHINCILLLLTKDFNSEINVNATDHKRNSVTCLCASSLTLRIPEDLENAAINALSSERARSLTPCGSSAEAEGSVAGDYDVCPPSKYRQPTAECNNVSHRKWGARGDIFQRLLAADYADGVSQPRTSKGTHALPDAEVVIEQLQRHVEGELRHAHITAMLPAWGQLLANDLVEVGQLPISGKCCERDSAVKDPSELQHCFVRAGPDCKEYKRSAPGFDLEACQKHTRQQMNIASAYIDGSGLYGSTRHEFDQLRTYISGGVKVESCKYCQVAGATGALHRALLQQHNNIGERLSHINPDWSEEDVFLEARRIITATIQHITYNEFLPLVLGQETTAKEGLRLTAEKHSSNYSSSVRGGIYNEFATAAMPAFWSMYPPEMLAKKMSAHELLSIAALQKSLVPSQTNAEGWSELALAVHRGRDHGVASYVHALDLCERRFADQSAANVSFDTLAQVSNIPEEYITNLRDIYQNANDIDLLVGALLEEPVVGALFGPTISCLLSLQFEQLKQTDRFWYENEIPPSSFTLDQLKSIRQTTLSGLLCGSHQVSTAQSKAFILEDNYLNSILDCDQLPKFDLKPWQVNPEDEVHVEHVEVEPATKEAIAELSPELIEAAVERAKQELEERKRFEYEVWRTKGGISARSPDGTAASFSKANLAALNLANSSLIFELTSNEIVKTLNHITRRKRQIFNPNQNAFNRNELTDTLQTVDISGLLGGAQKQLDTCPEPSQQCDANSPFRTLSGRCNNLRNPNWGKSLTTFSRLLPAQYEDGISAPRLTGVTGTALPNPRTISTTIHPDISNLHTRYSLMVMQFAQFVDHDLTLTPIHKGFHESIPSCRPCNSRQTVHPECNPFPVPAGDFYYPEVNVTSGERFCFPSMRSLPGQQSLGPRDQINQNTHFLDGSMVYGETTCLSNKLRGFSGRMNSTQVRGKELLPLGPHPECKSRNGLCFLGGDDRASEQPGLTAIHTAFLREHNRIVEGLRGVNPHWNGEQLFHHARKIVSAQVQHIVFNEFLPRILSWNAVNLYGLKLLPQGYYKDYNPSCSPIVFNEFAAAAFRIGHSLLRPHIPRLSVQHQPVEPPLLLRDGFFRMDALLQPGIIDEILRGLVATPMETLDQFITGEVTNHLFEDRKIPFSGIDLIALNIQRARDHGIPSYNNYRALCNLKRATNWNDLSREIPTEVINRFQKIYASVDDIDLFPGAMTERPLQGGLVGPTLACIIGIQFRQLRKCDRFWYENQNPEVKFTEAQLAEVRKVTLAKIVCENLEITGDMQRAAFDLPSNFLNPRVPCASMPQIDLNAWRENVQGCQIGNRNVRVGESAFPSPCTSCVCSAEGAQCASLRITDCGQLIRQWPKEAILRDEVCNSQCGIYLTGQQASGFNPQQRQGQAQPRVTRSRNQNLFKFPDLTPFIASL

SEQ ID NO: 42370 - DNA, 9710 bp, DROSOPHILA
gttgttattgatggtgttgctggcaggattagatgctggtggcggagcaatgggggcgcgcgctggaccaggaacgggtgcgtttattacgggtatgcaatagttctggctttcgatggaggcgcctcggttggtagagccaccattaaccagcgcttccgaggactcgctgcagttggagttcagaaaatcggtgaccacatcattgtcgctgtcctcgcccgcgttgtccataatagggtctactgaattctctgcgttttgggccaatttcctttgtttagcgactgtgttctattttacagctggctgcctagaaaaagaaagtttcagtatacaacgcacacacactcaaccgcgacgggcaccatacatgcatatatgtgtgtacatacgtacatatacacttgtgtatgcacttgctttttgctatttattgattttcccgccacccccgaaaacaccttgttgcgcgacgtaaattgttgcgcctttttcgaaggacgtcacttgtccttgcaccaacaacaaccacaataacagcagccacacaacagcagtggaagcaacaacagcaacaacaacggcagctcagcagcatcaacagcagtgcgtgggcgaggggaatgcgtgagttttaaacgataaattcgaacgggtgcttcgcgtgcgggaaagggaatactggccgttgcacttaaccgaaaactaaacggaatcttaagctagtgagatttctgccagcgttttaaaatttaaatgcgattcgagctggggttggaacttatatcgatgcttacccgatactatcgccagcagtcgggcagtgtgaccatgacggcggcacactttacatttaacagcgctgtcgctaacataaccagtgctgaaaagaagcgcccaaccattccgattccgattaacaacactacatttgaattcaaatttaatcctaactatgtaacggaaatcaaaatataattaaaacagaagaacttttgtctttattcgacgaacatttattgaaagtaaaatgatggccgtgcgatacagtacagggctacagttacgctacagttacaattgaatcgcaagaatggcgttactagttggtaaacgcgtgactgtgcgcctggaatgtgcattagttagtaggtagtaatatgtattagtatcactctgaagcaaccggcaatccgaatcgctctagcccatggtggtggccaggtgcttgttggtggccacggatccggatcctccgccgccgcctcctcctcctcctcctcctccgccgacaggaccctcgtttgtcacgcacgtgggaatggcactggaccacttgccgttcttaaggcacttgagcaccttggagccgcgcagatccagtccggcatcgcaagtgaacgtgatgctctcgccgatggcgtagtagaacttgacggaggacatcctgccgctgatgacggtgcccggatacgagcaggcctgcacgcacttgggcagcccgccagaccacctggcattatcctggcaggcaatgatcggctggccctgcatcatgtactcgggattgcaattgaactggaccacgtcgccggcacgataaggtgctgagccctgggcgtaaccattttgcggcgcccccggattgtcgcactgcacctcgacgcaggtgggcagcggcgctgaccactcgcccgtcggattgcagatcgcctccgccggaccacgcagcccgtaaccggaggcgcacgagaaggccgcccggccgcccacctcgcgcgacagcacggacacacggggcgagctcgcgttgctgcccattcccagcgggatgtcgccgcactcgacgctctcgcagaccggcaacggtgcgctccaattgccactcggtaggcagaacagctccgaggcgccaatcaaggagttcccgttagcgcaggacagcagcgcccgcgtgctcagcttagtatcgttggtgttcacgatcaggccgcgtcgcatcggtatctccgggcagttgatggcccgcaccaccacctccacggtgtgctcatgccgagctggggtcatgcacgaatagaacccggagtcgtcgctggccgcatccacaatgctcagccggtattccagtgtagagtcgcggccctcatccgcttcggttacccagccctctgtgtagttcctgcaagacgcagagattcattagtggagtttaccacatggaggacggtttcccaaaggtatctcccattaaccaggttcaaatatgtttagattgttttgagtacctataaaataaaaggtgtagataagagaagggctattccaagagattcccagaaccagaccctgctgatcattgccttttatagtataaataacccttaaagaaataaaaataaatgtttataagaaatccctaaagtcaaacgatctaatgatcaattcaaatacctaattgctgcttttaaaaatttaacctatagtccaataacgagatacaccatacacattaatttgaagttcagacgcaaataatttatgaacataccccttgctgaaattaattagcaactttaaagttattttagcgtgcctaaccacccgatacccacttgtgcgtgtgactgacgttccacttgggattcccgaagcgacgcatccacaggcactccatgtgcagagtggttcccggatagacaatcagcttgccatcgttgctctgggcgatgggtccgttctggtggcggaagaggatggtcggtgccttctccactggatttgagctcaagtcagattaactatcccgcactcggatattggatacctactcgcatagtcgttctcctggtttaggccggaacatacgggcttggtgttggtccattccgagtggatgcaggtcctctcgtggctgcccatgaacgagaactttccgatgtccatacatctgagagtaagtataagtaagtatcacaattgaacaaagtctgtttatgctcaatgcctcacctcgatatgatggtggctcctgggggaaagtccaccacgtcttctcggatctccaggtcgttgtagaaactaaccacattagcctcattgtttctgaacacacacgttccgttttctaaaaagattagggattagggataattaaagaggtgcttttccatgctatctatgtatcatacggactgacatatgaatggacataatttgagtaataatttagtttgctactctaatgtaatttagctttatttaaaactcaccacaattataggatcgccctatccacagtccattgtcgcatatgatgcgccacgtttgccgatccccagccgcatttgggatgcagttaaagaagatctccgtgccgctctcgtaggcgccatccagctctggatgatcggcattccttcgaagattaaggactaataacagatcatgactctgagaaactgccactcacttgtagaccagggcgccatccgttaacatgggcggaccgcacatcttcatgtcgtcgtgctcatcggtgccgttgtcgtggtgatcgtgatcgttgtccagttcgttgtgctccactttggggtgtggagtgggcgtggcatgctccagttcctcgcgtgactttcttaatccggactcacatggtatactgggtggagtgaggatgcccttgtggcaggacatctctatgggattggcgttagtggagagttcgcagcgaacgcttacactgctcccgtgtccaatggtcaatcctgcccggtagcctccctaaaaagaggtgattactggtttttgagattctgtgaggcatgctagtgaaccttacatcataaatgactcctggaatattgggcagcgtgcagggcaccgatgtgcactcagagaaggcattcaccgaccaagatccatgggcacaacggagctgagctgaaccctagaaattcggaggtgttagtgatgattcaatatatagaagatgaatggatttatttaatcaatatcccacctgtatattgaacccatcctcgcactccagggtgatgaactcgttggactggatctcctcgtaggtggagagcggggtcaatgaaggtttgtcgctcagctgtttggtgtggggctccaccttgtagtactgaccgtgctccacggcgggaaccaggcacggagcggataggcacttgggcgtctccggcttccaaatgcctcggatgcatcgcgccgtggcgttttcacccttaatattcagcttgaatccggcattgcactccagatgcagcatgatgcctacggcatttctgcctggaaccttgccaggacgaaccgtggtcacgttggcgaaggaatcccactcgagttcctcgcagggtcctcgcaatcgtttgcctccacctccctttccggcctctcctccatcactgatgtccacctcagcatccggaatagttgctcccgacggaggaggcgactgtccaatgctggagctccttctgcgcctccgacggacaatctgtgatttcagttgttcaatataggatcgggtggcattcaagtgcaggctacgcgatgctataggcggggatccgttggatagcagctcttccttgggagttctgtttacatgaacctggtggtttcgcgatgcctggttaatgttgggcagcgcaaccactccagatccgactactccacctgatccaatgccaccgctcccaaggtaattgtttccattctcgaattccctaaagttggacttgccccgcatggtgacctgtcctccatcgtgggtattcagattgtttcccactctacccactgcatcttgggagtggagcctctggtagatccggtcacgacctagcattttgcggacatagcgctgatatcgctctttgatcttttggtagtacttggagtaggcccggtcgacgtcggaggcatagggttgtgagttcgggtggggactggcgcttcgcttaacccgatgaaccgatggctggacaggatcggctactaaaagggaatatgatattgttaatatattgcttacaatcgaaaaatattattgcttactagcttttatatagttttggttatcgatcagttgcctttgaagttgtcgctgtcgctgcagaaggtacatggatctcagttggcggatctgcagagagcgacgtctgcggcgattccaacgcaggcgaggatgctggcccaggaggcactgtggcaggtccaagggccgccacttgccacccacacaggtggcgccaggcggaccaacctagtggagaagcgatgttgttgggaatcagcaatactaacaggatattgaagttacctccaggacatatcccttgtcgcaatcgtacatgatctgcttgttgttcacgatcttcttgacataaggtctatagtcatataggcccatgttgcccacaagcaggacctttccattgggtatgtagccgggaaaggagcagaagacctcgtcacatttgggcgtctctccggtccagttgccaaatgaacaagtgagcacatagtcatgcggatctgtcacatccttgccctccggactgaccagcttgaagccatctttgcacttgaatcgcgccttcatgccgtgctccgtcttgggagccattaccatgccgtgcttgggtggacgcggcatgctcttgcacctggcgggcacacagcgtggaatgatgctccacgtgccattgttgcacgtgggcggactgagcagggacaccgggaactcgtagttctcatcgcacttgacctccagtgccgttccgtgcttaaccttctccacaccaccaatgctctgcgtttgagtgggcgactgtgtggtggtcgtcggcggatggacgatcgtcgttccgttctcatccgtgattatctcgatgggatacacattgccctgcgaaatggtgggcaccacacagggcgccagacactcgggcagtgcgttccgccaccttccgtcgatctggcacacgctggagcccagtccattgatcatcatctctggttggcagcggaaaataatgctggcacctagtccggtgcccgcttcgatgttctcgatccatccgttgtacagcactccaggatggccgcagttgatctctattgaagggaatgcaatggaatacacagtagaaccatccagatgggactacaccacttacccttgcaggtgggcagagtgccgctccactttcggtccgctccgcagcgactggagctctcgcccacaagggtgtagccgtagcggcactcgtagctgaccaccgagttgtaggccagggtggtgtaggtggccttgccgttcttggggttctccggggtgggacacaccaccgaggtgaccactgtgcgggaggatgcgggagaatggggttagcaatgggattgggatggtgggggtatgctaaaagttaccacaaatctttgaaggccgccaaaccaaataaaacaacttcgaggaaacggttttcgaattcgattaatcaattcttgtatatatttttgcttgctcaagatttgcggtaacttttatttattcattcaacattaactggccaacaacaagaacaacaacaacaaggtagtgcatatgtaaatttgaacaatctgtttgtatgtatcgctagatcaataaccaaatcggagatagagagagaatgtgggtggctagcaggatcggagaactccgactggagaacctgagccctgaccaaagtgcgcttaatatatagtttcggatacggatatggggatctgtgccatttgccagctccaaggagtcggaaacgaaactcaaagggtcgcctcgcctaggataacgacgcttgggtggtggttacatttgcgctatccgctttaaaggtggtcaaagaggtcaaagaggttcggttacaagctctaccggcgccagcccgcaatactcacagacacaggtgggcagctccttgggcgtccacgatccgtccgactggcagtagcgctcgtgcttgcccaccagctcgtatccggttccgcagttgtaggtgatcttgcatccgtacgtgtagcactcgccggcatgccatccgtaggccggatccggtggctggccacaggatcgagctggaatcatcaaatagctatgcatacagaggctccccttttcagtgtgactgcactcacgttcgcattggatatccgggccgtaccagctggccaggttatcaatagccaggcacttggcccgcgggaatccattggtcacgtagccggtgtgacagtggtactgaaccgtggagtccaggtcaaaggtttcctgttccggcagcgccgagttccgtgcatgctctatctgcggcggcttcaggcagtaaactggaaggattgcaagcacgtttcgatataatctgtttattaacctgtggtagacttactattctgcttgcaagctggctcggctccggcccaatttccgtccgcctggcacagacgactctggagacccacaacgtggtagccgtgcggacaggcataggaggcgcgagctccgaagtggcgtccagccactgtgacctgacccaagctgggctgggctagttccgggcactcgcgatctaaggaaagaaagggcatcgagggatttggaattactttgcttgtataaaaagaattgatggttcaacatatcaactttctgattgaattacacttattttgttttaactattgcaatttaaatctatacccacctggtttaatgcaggaattgccacagacgccgtcgcacaggcacttcttcttcttgctcttgcaatcctcgtcggaggagcacttcctcaagcacttctggccgagcagcgtggcctgctcctcgtcgcgtggacactcggtggagggtgagttgcgaggattcttgtagacgcggccatcgtcgtcagactccagagagtcgtcgtcctcctcccagtcgtcgtcgtcgtcatcctgctgcggaatctccgaggtcgtctggatgctggtgctcatcgtgctggtcggcaccgaaatcactgcaagagaacaaggaggacagctgtcagtcatctgggctggaaaacaaaccccaattcccaggcgaatcaaccccttagcgcggcttctgttttggttccgggattcgcgtctattttgctccgcctcgcgtgcgggcgaaaacattgacctatttcccccgatgcctggtccagatgtctgatgatggctcggtcccagactcttttggagcctgcgcactggacgccagcttatataacgcagcagcatatacatttttcatcttgcccatttggaggactcccgaaaattgcaaataattattccggccactggtgagctcatccggactaccactaaaaggggctcaaatatactgattgtacttatcgggttttcaggttttttgggttttcttattgacctttgtagaccagaatggtggtcactagacactgcagcagcaggcgattcattttgattccgttgtagttgcggggtatccgtgtcctttttgatttttttcctttcgccgaactggcctcggatttatagcattttagctaacttgcaaaattcctctgctggccaatttaattggtaactttttcgacaagctcggtggcccgaaacttctcacttcgagccaaggaaacgaaatgcagccacgccagctgctttctcccctttttggctctggccttttgacagatcgggcgagaagcgcccaacttgacagctttcggcggtggttggtccctttaacggtgaagataggtttcggtgaaaattcgagcaaatgcgaaaggttcttgcatcctagctcgcttgttggatccaaacttgaatataaagatatcattaatttcgactgttaggaacttttttttgttagacgtcgaggaatcgatataagatgtgttgattacaatttaaggttcattagctatcatcatcatattaatacttatgataatgatagatataagtataagtattaatataataatgatagctaatgaagtgatttatattacataaacagagtttaaattaaacaataatcaagatttaatcataaacatatattggcagtaataatatgctttacacgatatgtttccttagtttctctaaaatccaccgtcttcttcaactttacatttacaatcccttacttaacatagcgtcagttttaacattttcaacttgaagttggctgcgataagcacaggtgatcattgttcagcgcttacgactatgttatatatttatatgcttacttatacttacttaaatttatatgcttattctactagaatttatattaaatttcttattttttttcatcacttaaaatcaacaacaaaagaatatctttatttctattcagtactttctttaactattactattaatatattactttaatttagtttatagtgaataccagtcaaatatagcaacttatatgtgaccaagtcttatggacaaggacattggttttttgggaaccattggacagttccactgtgcggcgaagcttttgcacatatacttgcacacataccagtgtagcaagtatgtaagtgtgtgagtgctttctcgcagagagagaaaataaagaaaacgtatcgttatcgtta

SEQ ID NO: 42371 - DNA, 5390 bp, DROSOPHILA
ctcgaagtgagaagtttcgggccaccgagcttgtcgaaaaagttaccaattaaattggccagcagaggaattttgcaagttagctaaaatgctataaatccgaggccagttcggcgaaaggaaaaaaatcaaaaaggacacggataccccgcaactacaacggaatcaaaatgaatcgcctgctgctgcagtgtctagtgaccaccattctggtctacaaagatgagcaccagcatccagacgacctcggagattccgcagcaggatgacgacgacgacgactgggaggaggacgacgactctctggagtctgacgacgatggccgcgtctacaagaatcctcgcaactcaccctccaccgagtgtccacgcgacgaggagcaggccacgctgctcggccagaagtgcttgaggaagtgctcctccgacgaggattgcaagagcaagaagaagaagtgcctgtgcgacggcgtctgtggcaattcctgcattaaaccagatcgcgagtgcccggaactagcccagcccagcttgggtcaggtcacagtggctggacgccacttcggagctcgcgcctcctatgcctgtccgcacggctaccacgttgtgggtctccagagtcgtctgtgccaggcggacggaaattgggccggagccgagccagcttgcaagcagaatatttactgcctgaagccgccgcagatagagcatgcacggaactcggcgctgccggaacaggaaacctttgacctggactccacggttcagtaccactgtcacaccggctacgtgaccaatggattcccgcgggccaagtgcctggctattgataacctggccagctggtacggcccggatatccaatgcgaacctcgatcctgtggccagccaccggatccggcctacggatggcatgccggcgagtgctacacgtacggatgcaagatcacctacaactgcggaaccggatacgagctggtgggcaagcacgagcgctactgccagtcggacggatcgtggacgcccaaggagctgcccacctgtgtcttggtcacctcggtggtgtgtcccaccccggagaaccccaagaacggcaaggccacctacaccaccctggcctacaactcggtggtcagctacgagtgccgctacggctacacccttgtgggcgagagctccagtcgctgcggagcggaccgaaagtggagcggcactctgcccacctgcaaggagatcaactgcggccatcctggagtgctgtacaacggatggatcgagaacatcgaagcgggcaccggactaggtgccagcattattttccgctgccaaccagagatgatgatcaatggactgggctccagcgtgtgccagatcgacggaaggtggcggaacgcactgcccgagtgtctggcgccctgtgtggtgcccaccatttcgcagggcaatgtgtatcccatcgagataatcacggatgagaacggaacgacgatcgtccatccgccgacgaccaccacacagtcgcccactcaaacgcagagcattggtggtgtggagaaggttaagcacggaacggcactggaggtcaagtgcgatgagaactacgagttcccggtgtccctgctcagtccgcccacgtgcaacaatggcacgtggagcatcattccacgctgtgtgcccgccaggtgcaagagcatgccgcgtccacccaagcacggcatggtaatggctcccaagacggagcacggcatgaaggcgcgattcaagtgcaaagatggcttcaagctggtcagtccggagggcaaggatgtgacagatccgcatgactatgtgctcacttgttcatttggcaactggaccggagagacgcccaaatgtgacgaggtcttctgctcctttcccggctacatacccaatggaaaggtcctgcttgtgggcaacatgggcctatatgactatagaccttatgtcaagaagatcgtgaacaacaagcagatcatgtacgattgcgacaagggatatgtcctggaggttggtccgcctggcgccacctgtgtgggtggcaagtggcggcccttggacctgccacagtgcctcctgggccagcatcctcgcctgcgttggaatcgccgcagacgtcgctctctgcagatccgccaactgagatccatgtaccttctgcagcgacagcgacaacttcaaaggcaactgatcgataaccaaaactatataaaagctatagccgatcctgtccagccatcggttcatcgggttaagcgaagcgccagtccccacccgaactcacaaccctatgcctccgacgtcgaccgggcctactccaagtactaccaaaagatcaaagagcgatatcagcgctatgtccgcaaaatgctaggtcgtgaccggatctaccagaggctccactcccaagatgcagtgggtagagtgggaaacaatctgaatacccacgatggaggacaggtcaccatgcggggcaagtccaactttagggaattcgagaatggaaacaattaccttgggagcggtggcattggatcaggtggagtagtcggatctggagtggttgcgctgcccaacattaaccaggcatcgcgaaaccaccaggttcatgtaaacagaactcccaaggaagagctgctatccaacggatccccgcctatagcatcgcgtagcctgcacttgaatgccacccgatcctatattgaacaactgaaatcacagattgtccgtcggaggcgcagaaggagctccagcattggacagtcgcctcctccgtcgggagcaactattccggatgctgaggtggacatcagtgatggaggagaggccggaaagggaggtggaggcaaacgattgcgaggaccctgcgaggaactcgagtgggattccttcgccaacgtgaccacggttcgtcctggcaaggttccaggcagaaatgccgtaggcatcatgctgcatctggagtgcaatgccggattcaagctgaatattaagggtgaaaacgccacggcgcgatgcatccgaggcatttggaagccggagacgcccaagtgcctatccgctccgtgcctggttcccgccgtggagcacggtcagtactacaaggtggagccccacaccaaacagctgagcgacaaaccttcattgaccccgctctccacctacgaggagatccagtccaacgagttcatcaccctggagtgcgaggatgggttcaatatacagggttcagctcagctccgttgtgcccatggatcttggtcggtgaatgccttctctgagtgcacatcggtgccctgcacgctgcccaatattccaggagtcatttatgatggaggctaccgggcaggattgaccattggacacgggagcagtgtaagcgttcgctgcgaactctccactaacgccaatcccatagagatgtcctgccacaagggcatcctcactccacccagtataccatgtgagtccggattaagaaagtcacgcgaggaactggagcatgccacgcccactccacaccccaaagtggagcacaacgaactggacaacgatcacgatcaccacgacaacggcaccgatgagcacgacgacatgaagatgtgcggtccgcccatgttaacggatggcgccctggtctacaagaatgccgatcatccagagctggatggcgcctacgagagcggcacggagatcttctttaactgcatcccaaatgcggctggggatcggcaaacgtggcgcatcatatgcgacaatggactgtggatagggcgatcctataattgtgaaaacggaacgtgtgtgttcagaaacaatgaggctaatgtggttagtttctacaacgacctggagatccgagaagacgtggtggactttcccccaggagccaccatcatatcgagatgtatggacatcggaaagttctcgttcatgggcagccacgagaggacctgcatccactcggaatggaccaacaccaagcccgtatgttccggcctaaaccaggagaacgactatgcgatggagaaggcaccgaccatcctcttccgccaccagaacggacccatcgcccagagcaacgatggcaagctgattgtctatccgggaaccactctgcacatggagtgcctgtggatgcgtcgcttcgggaatcccaagtggaacgtcagtcacacgcacaacaggaactacacagagggctgggtaaccgaagcggatgagggccgcgactctacactggaataccggctgagcattgtggatgcggccagcgacgactccgggttctattcgtgcatgaccccagctcggcatgagcacaccgtggaggtggtggtgcgggccatcaactgcccggagataccgatgcgacgcggcctgatcgtgaacaccaacgatactaagctgagcacgcgggcgctgctgtcctgcgctaacgggaactccttgattggcgcctcggagctgttctgcctaccgagtggcaattggagcgcaccgttgccggtctgcgagagcgtcgagtgcggcgacatcccgctgggaatgggcagcaacgcgagctcgccccgtgtgtccgtgctgtcgcgcgaggtgggcggccgggcggccttctcgtgcgcctccggttacgggctgcgtggtccggcggaggcgatctgcaatccgacgggcgagtggtcagcgccgctgcccacctgcgtcgaggtgcagtgcgacaatccgggggcgccgcaaaatggttacgcccagggctcagcaccttatcgtgccggcgacgtggtccagttcaattgcaatcccgagtacatgatgcagggccagccgatcattgcctgccaggataatgccaggtggtctggcgggctgcccaagtgcgtgcaggcctgctcgtatccgggcaccgtcatcagcggcaggatgtcctccgtcaagttctactacgccatcggcgagagcatcacgttcacttgcgatgccggactggatctgcgcggctccaaggtgctcaagtgccttaagaacggcaagtggtccagtgccattcccacgtgcgtgacaaacgagggtcctgtcggcggaggaggaggaggaggaggaggcggcggcggaggatccggatccgtggccaccaacaagcacctggccaccaccatgggctagagcgattcggattgccggttgcttcagagtgatactaatacatattactacctactaactaatgcacattccaggcgcacagtcacgcgtttaccaactagtaacgccattcttgcgattcaattgtaactgtagcgtaactgtagccctgtactgtatcgcacggccatcattttactttcaataaatgttcgtcgaataaagac

SEQ ID NO: 42372 - protein, 1653 aa, DROSOPHILA
MSTSIQTTSEIPQQDDDDDDWEEDDDSLESDDDGRVYKNPRNSPSTECPRDEEQATLLGQKCLRKCSSDEDCKSKKKKCLCDGVCGNSCIKPDRECPELAQPSLGQVTVAGRHFGARASYACPHGYHVVGLQSRLCQADGNWAGAEPACKQNIYCLKPPQIEHARNSALPEQETFDLDSTVQYHCHTGYVTNGFPRAKCLAIDNLASWYGPDIQCEPRSCGQPPDPAYGWHAGECYTYGCKITYNCGTGYELVGKHERYCQSDGSWTPKELPTCVLVTSVVCPTPENPKNGKATYTTLAYNSVVSYECRYGYTLVGESSSRCGADRKWSGTLPTCKEINCGHPGVLYNGWIENIEAGTGLGASIIFRCQPEMMINGLGSSVCQIDGRWRNALPECLAPCVVPTISQGNVYPIEIITDENGTTIVHPPTTTTQSPTQTQSIGGVEKVKHGTALEVKCDENYEFPVSLLSPPTCNNGTWSIIPRCVPARCKSMPRPPKHGMVMAPKTEHGMKARFKCKDGFKLVSPEGKDVTDPHDYVLTCSFGNWTGETPKCDEVFCSFPGYIPNGKVLLVGNMGLYDYRPYVKKIVNNKQIMYDCDKGYVLEVGPPGATCVGGKWRPLDLPQCLLGQHPRLRWNRRRRRSLQIRQLRSMYLLQRQRQLQRQLIDNQNYIKAIADPVQPSVHRVKRSASPHPNSQPYASDVDRAYSKYYQKIKERYQRYVRKMLGRDRIYQRLHSQDAVGRVGNNLNTHDGGQVTMRGKSNFREFENGNNYLGSGGIGSGGVVGSGVVALPNINQASRNHQVHVNRTPKEELLSNGSPPIASRSLHLNATRSYIEQLKSQIVRRRRRRSSSIGQSPPPSGATIPDAEVDISDGGEAGKGGGGKRLRGPCEELEWDSFANVTTVRPGKVPGRNAVGIMLHLECNAGFKLNIKGENATARCIRGIWKPETPKCLSAPCLVPAVEHGQYYKVEPHTKQLSDKPSLTPLSTYEEIQSNEFITLECEDGFNIQGSAQLRCAHGSWSVNAFSECTSVPCTLPNIPGVIYDGGYRAGLTIGHGSSVSVRCELSTNANPIEMSCHKGILTPPSIPCESGLRKSREELEHATPTPHPKVEHNELDNDHDHHDNGTDEHDDMKMCGPPMLTDGALVYKNADHPELDGAYESGTEIFFNCIPNAAGDRQTWRIICDNGLWIGRSYNCENGTCVFRNNEANVVSFYNDLEIREDVVDFPPGATIISRCMDIGKFSFMGSHERTCIHSEWTNTKPVCSGLNQENDYAMEKAPTILFRHQNGPIAQSNDGKLIVYPGTTLHMECLWMRRFGNPKWNVSHTHNRNYTEGWVTEADEGRDSTLEYRLSIVDAASDDSGFYSCMTPARHEHTVEVVVRAINCPEIPMRRGLIVNTNDTKLSTRALLSCANGNSLIGASELFCLPSGNWSAPLPVCESVECGDIPLGMGSNASSPRVSVLSREVGGRAAFSCASGYGLRGPAEAICNPTGEWSAPLPTCVEVQCDNPGAPQNGYAQGSAPYRAGDVVQFNCNPEYMMQGQPIIACQDNARWSGGLPKCVQACSYPGTVISGRMSSVKFYYAIGESITFTCDAGLDLRGSKVLKCLKNGKWSSAIPTCVTNEGPVGGGGGGGGGGGGGSGSVATNKHLATTMG

SEQ ID NO: 42373 - DNA, 8826 bp, DROSOPHILA
tttcttcttggatgttagaaaattaaatggtataatttcgaaagaaaattcatttggcctccaaattttgaaggtaagtgtcaaaagttattgcatacttttgggcggcgtcgggaaatgtaccaacaaattcatggcagtatatattccactatccaaaatagattccaaaatcctaagatcaagctttaattgataatgttaaaagccctgcgcaatttagttagcccaaattttgaatcaagtcacaacaatcaaaggttataaaatggcgcacaagctgcacttggcccaaaactgaatttccggataagaaggtagaggactcttgagctccaccggcacattgatttatttgaggaagcacgcacgctgctaggccgaggtcaaatgtgtaagacattaccgtgtacccatgccagatctggggctagaaatctggcacccacttacccccgaatgggagccgaaaacccattaagtggcaccattctgcattcgccatcccaggtgactttgaaagttgcagcaatcgcgaaccaacgcccacacctgaaatcccggatcggacttgaatgaaagtcaggcacgcaagcttaccgcctttgggggatgggcctgagcacttgaaaacacttgttgtatgtcaaagccagaggcccagacatcaatcaggcgtctgacatccataaagcaaagcgatggctttccaatccaggcggaagcaacaggtggcttaccgagagaaactcctccgcttggtcccccttttttgagggaaatgccgcgtgcccgtcagtcgtgctgaactcaaaaacaaccgtcaactaggcgactgtcaaatgcgccacgtatccggattatcgatcaaacagcagcgactttacgccagtttctgggtctccgctatggcgcagacacgtattggatttcaaaggctgcggaacggaatcgcagagctgcacttgcggcactcggcgtagttaaggatagcaccaatatggatgaccgcacgatagactccatattcctgggctcgctggagtccctgccgccggttagctcgaaaatcgtgcgcatctttaccagctccacgttcacgggtaggtccgacaacctagtaacctttgcccatgtgtggctgtttggcggggaagtgtgaaattgttatgcaatccgtattttcacagacaccacaatggagcggaacacactgatggccaagtgctatccacggatcaaggactactgtcgcgagaagcatggcctagaatttcaggtggtcgacatgcgttggggtgtgcgagatgaggccactgacgatcacatgaccacggagctctgcatgcgcgagattaaaaactgtcagcggctctcgatgggaccgaactttatcgtgtttctgggtcagaagtacggctatcggcccattcccacttacatagtgtcctctgaattggccctaatctgcgaagaactcacatcgatgggagtggaccgtgccatcctcgatctgtggtacaaaaaggacagcaacgcagtgccacccatctcggtgctgcagcccatctcatcgattttaattaatttcaacaacaaggttagttttctagtgaaaaaatagtaagtattttattaattgtggtgaagtcgagtgagcagtcttaataaattaaagtgaactgttaaagttttgcctatttaatacaaacattcttaaggactttcgtaagtaatagtcctattagagaacgctaggttcttttttactagtcattagtgtgtaaattctcaataggcaccataatgtagtttttcctaagctcaatcgatttgttaggaagtaaccgattatatacgactccgttctccagcgcgttcccaagctgcaggcggaggatcaggctgtgtggtgggacactctgaacaagatgcagaagctgctgcgcaaggcagctgcctccttgggggccagtaacaagatgtccaaggaggatgtccacaactatttcatgtcgggtgagtagtaagtagcaaacgtagtggtagctgaacaaacattggtccgcgtttagtgacggagcgggaggtgatcaacggaatattgaacgtcaagaacacaaagaaccactgtctgtcctatgtgaggtacatcaacaacattaatctgcagaacctgaaaaaggcctctctgttcgtggacatcatcaaccgcagcctggacaccgagtcggccaagttgctgagtgacctgagagacgtccggttgccggccaagatcgaggccgttaacgcacagaagtaaggcatgaaacgagagcccaagccggcggaaggaggagaatgatatggatgctaattcgttctgatgtggggattggggggcactttgcagatacacggtggaatggatcggacgggagggactggacattgagacgcacgaggagtacctgaatcatttcatctctcacttctataagaacgtagtgaaactggtggatagggcgatgcgcaaagaagactccagtgcacaggggcagatagtaactgagatccttcagcatctgcacgcttgcaacaattcggtcaagatattctacgggcgcgaggaaagttgcgaacgtatcaagcgctacatgctgggggattcagataagccacttgtccttttcggcgacggaggctgcggcaaaacctccctgctctccaagagtgtttccctcgtggccaccgagtggttcgcccacgtccggcccatcaatgtcatccgcttcttgggcaccacgccggactccagtgccttgacggccacccttatctccatttgtcagcaggtgaagtccatccagtaccagctagcatccaaactcgatactaacccttctaacctcttactccgaaacacacacacacacactcccctaatccaattagatctcttacaactacatgctacccttcgagaacatacccgatgatcttgttcccttaacagcacactttaagcaattactaacttacgccagccccacccagccgctcaccatctacctcgactcagtcgaccagctgacaggcacccaagactcgaataaggtatcatggatacccacgcgtctgcccccgcactgtaaggtgagccctggttgtgaacgccactccaagttcacttccttgttttccttcctttcttctttgtgcatgatagtctgaatacttttgtaaataaaaaatctctatgcgtttattcttagtgcatgatattcgaaaatttttaatggaagttaaattcctattctcctgacactgtatataattatgcatgacatttttaatttccacttattgagcacctaagcccttgatagattaaactattttgtatattgttaggaacaaaaatggtaaaatcatttgctgtatatataaattcttcacaaaaagataaaaattatatatttttctgcgaaagaactgccaaaatattaaaatttattggattttcaaaattagagttgaaaatgtgcagtgagcttcgaatcttttatctttaaataccctgtttaaaccccagcatcatcattactcatacgccctgtatatacattgcatgaaaccgcatgccccaactcagatgggaaactgagtaagtttttccaattgcttgacctgtgcgtgctaagcaaaatcactagaaaccgccaccagaacatttgcaggcacctcacccaaaacgacatcgcaaggaagccgttctgcatgaggcgatcctcgcgtggtatccacccaatcccaatgtccttgcatatatatccgattccgactgattccagataatcatctcatgcgccaacgaaccggcaaatccgacggtttcccacgaataccatgtcttgtgcaagatgatcgatgtggaggagaactttatcgaggtcacagcactgggcgaggacttggcaatgaacgtgatcaagatgtggatgaagacggcgtgccgggatcttaacaattaccagtggcgcctggtggctaatgccattagcaagtgctccttgccaatttttgttaagctagttttcgccgaaatctgccgttggcgaagctacacacgtccccaggagacgcacctggccaacactgtgatggattccattatgctgctgttcgaacgggtagagaaacaacacggtcgtatactggttttccatgctctagcctacataaccgcctccaaatcgggactttccgagagcgagctggaggatctcatttcgctggacgacaaggtgctggacgatgtctaccaatatcatttgccaccgacgcggcgtattccgccacttctctggacccgtatccgcaacgacttgcccaactatttgagcgaacgcgaggcggacggtgtaaatgtgatgaactggtatcaccggcagttccgggacaccgccaaggaacgctactttaagaacatgaacatggccatttactttcactccatgattgcagattactatcttggcatttggggcggtggggtgccgaaaccgtttaagtttacagagatacagcggcacaggttcggattggcggacaaagagggatcggcggatcgtaaggtgcccatccagccgttggtcttcagcagcaaagatggactatccaagcgctacaatctgcgcaaggtgagctcggccatatgcatatctctattatataaaaattcgatctctattagtttggtgagctgccgtttcactttgtacgctcgcgacggtttaaagatttgttcgagcacgtcctcttcaactacgactggctgcacgccaagctttccagctgtccactgcaggcggtgctggcggatttcgaggatgcctccagcaacaccgacgacaaggaagccaagcgagaacttatgctggtttccgatgcactgcgtctaggtggcgccattctggccatctatcccaacatgctggcaccgcagctggtcggtcgtcttcttcccgagatcggcggtaatcccaatatcaaaatgctgttacgagcttgcgatcggagtggccccaaggactgcgctcttattccggtgaatcattgcctgcacacgccaggtgggccacttaaagtaggtgcctcagtctttaaatagcagttaaacttgataataagaacccttttaattatagtattccctggagggccaccagttcgcggtgtttgctttttgcttgactagcgacatgcgctacatggtatccatatccacgcacttcatcaccttcgacctctctacttcggacctgacgcgtgacgttaatcccggcatcgagggcattatgcagcaattggtcctgagtccagataacaagtgggctgccgcctactcgaacaacaaccagacggttctgctcaacatgctctccagcgagtttgtggtgattaacagtccattcgaagagtcccatggaccagtaagcggcctctatctactaaatcaaaagtaagtttaagaaagcattaagtgaatattgcaactcactaattcttttcgatttaagtttgtttatcacctgcaagcttcggtgggcccaatttgatacgcgcggcaatcttgtagatacgtttgatgttcccggcgaaaataaagattgggagatcttaagtaagtaaaatatatcatgactactaaggaatttaatcgaaatctgataacacaatgtacgtctatttatttagctatggagttcttcaatcctgcggattacaacgtagttttctggtctggctccatcaacgacatgcgtctaagactggactcgtgtcggggtggccactactccaactgtcagctgctctttagcgccatggtgatgaacaaagctaggactcgggcctatggatgtgccaacgaagagaactttgaggtctctgtgttcgacttcattgaagatgaggttactggggacatatgttggactttggtagagagcttgccgcgtttcgagaacgatgacaaggagatgttgctgcagttacggcttgatcaacatgatcgcatgcttctggggacggctggcaagggtttcgtaatctgggactttggcagcaaggataaggatgcggcggaagagtgccgtttacgggagggcgccctgtacctggccctaccgcacggagtgcgcaatattaccactcgcataatgcagtctaactcgatcatggttagctccaaattggattatgccgttgccggagtgcgtaagaacctgtatgtgtggtgcctacagtctggtcagttggcaaaggtactggatgcccactttggacgtattattcaactggagccgctgaccatcggcaactggaacaacctggtcacatcctccattgatcgttccgtaaaggtgtggaacatcaacaatattttcgaaaaggtccacgtcatcgaccgtcacgaattgcaaattgacgacatcagcctgtcggaggttgatatggccgtgaccgtcactcgcagttgcgtgggtgtttgggagacccgatccggtcgccttctggccaagctggccgacagtccgttgggcgccatcgtcacacatgccgagatcaccccggatgggcgctatattatctcctcggagactggcaagtttttagtgtggaaccgtgtgtccgagcaggtagtttttagggacgaccaaccaggaattcagcaaatcacccttatggactacggctataaggttctcaccgtgtctgtgccgaacataaatcagcgggatatccttgcagcagctgctggaggctcggcggatgaagccaaccggcttacggcgataacgactatgcggtccgtgcctggtgagttagtctttgatacttatttggtttaaaagtaaaaaaaaaaaaacttacacgagtacattattgcagagggctccatctttttccgattcgaattccccatacggatgatcacgggcatgccttttcgtcaatcggttataacagccgacaacgcatacattgtggtggttacggtggataagtccaacaaggattgcctgggcgtctacagcgccacaaatggagcatttgtttccaaagtcctgttgaagggctgttccattaaggaggtcatttcactagtcccgatgccgcacaaggccaaccaggtggccgtgatcagtagcgagaagggcagcgtcatggacatcaagacgaagaagcacgtccgctccattgccaagtggggcggtagcattacgcgagacggcaagtgtggattatatgcccccacccgcggcggactggaaatgttggaactgcgcaaaggcacaacagttaaaacctttatacccaaggtggccgagggcgtgttctcggtgatctgcatcttcacggagaacgacgagtacgtggcttattaccatagcggccgcaagaccatacgcgtatttcgcaccgcggacactgaaatgatagccaactaccggctgcaggctgagcttacggcgatcaaaagcagcaaagatggacgcgctatagttttgggaactgtagacgggtgtatgtcggtgctggcgatcgtcgatccaaagaaagaggaaatgaatgagtacctgaacgacctgccctcccgcgacgagaactggaaggccaagttggccaaaatgaaggcccgggttggtttcaaggcggcaattcgtgtggccaccatttcctcacgttacgccaaaaccagcaagggaggagaggatggagaggaggagctgctcacagagattacggaggacattgtcgtgccagtggccgattaactcaattcgttaatttataaatataacatttattttcgcatatagttcatgaggatgttacaaaaatacgctgcgtttctactgtgtatgttatcctgcgtgtaatgcgtgctctcggcatcgaaataagtgtgtatgtgcgggtaaaactgaatgggtcttaaactaaaaaatggttaaggggtaagtgctatttggtaagaactacggttagctaatatgagtataaattagagtttttagcgcgcactgagcccaacgcttggcttgaaacaatttgaggggtgttgagagtgttgaaaacataaccagacataataataacaagaatcgatcctagtaggcgcgtgttgcaaaaacaatgacctttcaagtatacacaaacctttaacatgctactgcttttactgacaattcaaacaaaatagcgtaggcataaactaacaagctgtctaatggaacccggtctcagtcacagtcgccactttaatctcaactcagccaatcgaatcttattgaatcgcatacgaaacacaactcagtgctaatacatagaccgatcgtttgttattagtaaaattacaatacatagttggaggagacatagtaatagtgtaatctgttaattattgttactgttgttaacctgctttcgacactcactgctgcttctgttaccacacattattaccgtgaatatatatgtgccgatccgtaagcatacaactatgttaaataataaatgatttatgtagtttacgaggacttgctcgatcagtgtgttttgaggggtctcttttttcgtataattttaagctgccgcttgtctatagctaaggttttttttagctacgggaagcgcacagtttattgggcatgattctctttcttgatttgagccagctttgcctggagatgctgcaagcgatttggtgacatgtcccgcttctgattgaaataccccagttaatggttgtttattttttcgtttagcctactc

SEQ ID NO: 42374 - DNA, 5199 bp, DROSOPHILA
atggatgaccgcacgatagactccatattcctgggctcgctggagtccctgccgccggttagctcgaaaatcgtgcgcatctttaccagctccacgttcacggacaccacaatggagcggaacacactgatggccaagtgctatccacggatcaaggactactgtcgcgagaagcatggcctagaatttcaggtggtcgacatgcgttggggtgtgcgagatgaggccactgacgatcacatgaccacggagctctgcatgcgcgagattaaaaactgtcagcggctctcgatgggaccgaactttatcgtgtttctgggtcagaagtacggctatcggcccattcccacttacatagtgtcctctgaattggccctaatctgcgaagaactcacatcgatgggagtggaccgtgccatcctcgatctgtggtacaaaaaggacagcaacgcagtgccacccatctcggtgctgcagcccatctcatcgattttaattaatttcaacaacaagcgcgttcccaagctgcaggcggaggatcaggctgtgtggtgggacactctgaacaagatgcagaagctgctgcgcaaggcagctgcctccttgggggccagtaacaagatgtccaaggaggatgtccacaactatttcatgtcggtgacggagcgggaggtgatcaacggaatattgaacgtcaagaacacaaagaaccactgtctgtcctatgtgaggtacatcaacaacattaatctgcagaacctgaaaaaggcctctctgttcgtggacatcatcaaccgcagcctggacaccgagtcggccaagttgctgagtgacctgagagacgtccggttgccggccaagatcgaggccgttaacgcacagaaatacacggtggaatggatcggacgggagggactggacattgagacgcacgaggagtacctgaatcatttcatctctcacttctataagaacgtagtgaaactggtggatagggcgatgcgcaaagaagactccagtgcacaggggcagatagtaactgagatccttcagcatctgcacgcttgcaacaattcggtcaagatattctacgggcgcgaggaaagttgcgaacgtatcaagcgctacatgctgggggattcagataagccacttgtccttttcggcgacggaggctgcggcaaaacctccctgctctccaagagtgtttccctcgtggccaccgagtggttcgcccacgtccggcccatcaatgtcatccgcttcttgggcaccacgccggactccagtgccttgacggccacccttatctccatttgtcagcagatctcttacaactacatgctacccttcgagaacatacccgatgatcttgttcccttaacagcacactttaagcaattactaacttacgccagccccacccagccgctcaccatctacctcgactcagtcgaccagctgacaggcacccaagactcgaataaggtatcatggatacccacgcgtctgcccccgcactgtaagataatcatctcatgcgccaacgaaccggcaaatccgacggtttcccacgaataccatgtcttgtgcaagatgatcgatgtggaggagaactttatcgaggtcacagcactgggcgaggacttggcaatgaacgtgatcaagatgtggatgaagacggcgtgccgggatcttaacaattaccagtggcgcctggtggctaatgccattagcaagtgctccttgccaatttttgttaagctagttttcgccgaaatctgccgttggcgaagctacacacgtccccaggagacgcacctggccaacactgtgatggattccattatgctgctgttcgaacgggtagagaaacaacacggtcgtatactggttttccatgctctagcctacataaccgcctccaaatcgggactttccgagagcgagctggaggatctcatttcgctggacgacaaggtgctggacgatgtctaccaatatcatttgccaccgacgcggcgtattccgccacttctctggacccgtatccgcaacgacttgcccaactatttgagcgaacgcgaggcggacggtgtaaatgtgatgaactggtatcaccggcagttccgggacaccgccaaggaacgctactttaagaacatgaacatggccatttactttcactccatgattgcagattactatcttggcatttggggcggtggggtgccgaaaccgtttaagtttacagagatacagcggcacaggttcggattggcggacaaagagggatcggcggatcgtaaggtgcccatccagccgttggtcttcagcagcaaagatggactatccaagcgctacaatctgcgcaagtttggtgagctgccgtttcactttgtacgctcgcgacggtttaaagatttgttcgagcacgtcctcttcaactacgactggctgcacgccaagctttccagctgtccactgcaggcggtgctggcggatttcgaggatgcctccagcaacaccgacgacaaggaagccaagcgagaacttatgctggtttccgatgcactgcgtctaggtggcgccattctggccatctatcccaacatgctggcaccgcagctggtcggtcgtcttcttcccgagatcggcggtaatcccaatatcaaaatgctgttacgagcttgcgatcggagtggccccaaggactgcgctcttattccggtgaatcattgcctgcacacgccaggtgggccacttaaatattccctggagggccaccagttcgcggtgtttgctttttgcttgactagcgacatgcgctacatggtatccatatccacgcacttcatcaccttcgacctctctacttcggacctgacgcgtgacgttaatcccggcatcgagggcattatgcagcaattggtcctgagtccagataacaagtgggctgccgcctactcgaacaacaaccagacggttctgctcaacatgctctccagcgagtttgtggtgattaacagtccattcgaagagtcccatggaccagtaagcggcctctatctactaaatcaaaatttgtttatcacctgcaagcttcggtgggcccaatttgatacgcgcggcaatcttgtagatacgtttgatgttcccggcgaaaataaagattgggagatcttaactatggagttcttcaatcctgcggattacaacgtagttttctggtctggctccatcaacgacatgcgtctaagactggactcgtgtcggggtggccactactccaactgtcagctgctctttagcgccatggtgatgaacaaagctaggactcgggcctatggatgtgccaacgaagagaactttgaggtctctgtgttcgacttcattgaagatgaggttactggggacatatgttggactttggtagagagcttgccgcgtttcgagaacgatgacaaggagatgttgctgcagttacggcttgatcaacatgatcgcatgcttctggggacggctggcaagggtttcgtaatctgggactttggcagcaaggataaggatgcggcggaagagtgccgtttacgggagggcgccctgtacctggccctaccgcacggagtgcgcaatattaccactcgcataatgcagtctaactcgatcatggttagctccaaattggattatgccgttgccggagtgcgtaagaacctgtatgtgtggtgcctacagtctggtcagttggcaaaggtactggatgcccactttggacgtattattcaactggagccgctgaccatcggcaactggaacaacctggtcacatcctccattgatcgttccgtaaaggtgtggaacatcaacaatattttcgaaaaggtccacgtcatcgaccgtcacgaattgcaaattgacgacatcagcctgtcggaggttgatatggccgtgaccgtcactcgcagttgcgtgggtgtttgggagacccgatccggtcgccttctggccaagctggccgacagtccgttgggcgccatcgtcacacatgccgagatcaccccggatgggcgctatattatctcctcggagactggcaagtttttagtgtggaaccgtgtgtccgagcaggtagtttttagggacgaccaaccaggaattcagcaaatcacccttatggactacggctataaggttctcaccgtgtctgtgccgaacataaatcagcgggatatccttgcagcagctgctggaggctcggcggatgaagccaaccggcttacggcgataacgactatgcggtccgtgcctgagggctccatctttttccgattcgaattccccatacggatgatcacgggcatgccttttcgtcaatcggttataacagccgacaacgcatacattgtggtggttacggtggataagtccaacaaggattgcctgggcgtctacagcgccacaaatggagcatttgtttccaaagtcctgttgaagggctgttccattaaggaggtcatttcactagtcccgatgccgcacaaggccaaccaggtggccgtgatcagtagcgagaagggcagcgtcatggacatcaagacgaagaagcacgtccgctccattgccaagtggggcggtagcattacgcgagacggcaagtgtggattatatgcccccacccgcggcggactggaaatgttggaactgcgcaaaggcacaacagttaaaacctttatacccaaggtggccgagggcgtgttctcggtgatctgcatcttcacggagaacgacgagtacgtggcttattaccatagcggccgcaagaccatacgcgtatttcgcaccgcggacactgaaatgatagccaactaccggctgcaggctgagcttacggcgatcaaaagcagcaaagatggacgcgctatagttttgggaactgtagacgggtgtatgtcggtgctggcgatcgtcgatccaaagaaagaggaaatgaatgagtacctgaacgacctgccctcccgcgacgagaactggaaggccaagttggccaaaatgaaggcccgggttggtttcaaggcggcaattcgtgtggccaccatttcctcacgttacgccaaaaccagcaagggaggagaggatggagaggaggagctgctcacagagattacggaggacattgtcgtgccagtggccgattaa

SEQ ID NO: 42375 - protein, 1732 aa, DROSOPHILA
MDDRTIDSIFLGSLESLPPVSSKIVRIFTSSTFTDTTMERNTLMAKCYPRIKDYCREKHGLEFQVVDMRWGVRDEATDDHMTTELCMREIKNCQRLSMGPNFIVFLGQKYGYRPIPTYIVSSELALICEELTSMGVDRAILDLWYKKDSNAVPPISVLQPISSILINFNNKRVPKLQAEDQAVWWDTLNKMQKLLRKAAASLGASNKMSKEDVHNYFMSVTEREVINGILNVKNTKNHCLSYVRYINNINLQNLKKASLFVDIINRSLDTESAKLLSDLRDVRLPAKIEAVNAQKYTVEWIGREGLDIETHEEYLNHFISHFYKNVVKLVDRAMRKEDSSAQGQIVTEILQHLHACNNSVKIFYGREESCERIKRYMLGDSDKPLVLFGDGGCGKTSLLSKSVSLVATEWFAHVRPINVIRFLGTTPDSSALTATLISICQQISYNYMLPFENIPDDLVPLTAHFKQLLTYASPTQPLTIYLDSVDQLTGTQDSNKVSWIPTRLPPHCKIIISCANEPANPTVSHEYHVLCKMIDVEENFIEVTALGEDLAMNVIKMWMKTACRDLNNYQWRLVANAISKCSLPIFVKLVFAEICRWRSYTRPQETHLANTVMDSIMLLFERVEKQHGRILVFHALAYITASKSGLSESELEDLISLDDKVLDDVYQYHLPPTRRIPPLLWTRIRNDLPNYLSEREADGVNVMNWYHRQFRDTAKERYFKNMNMAIYFHSMIADYYLGIWGGGVPKPFKFTEIQRHRFGLADKEGSADRKVPIQPLVFSSKDGLSKRYNLRKFGELPFHFVRSRRFKDLFEHVLFNYDWLHAKLSSCPLQAVLADFEDASSNTDDKEAKRELMLVSDALRLGGAILAIYPNMLAPQLVGRLLPEIGGNPNIKMLLRACDRSGPKDCALIPVNHCLHTPGGPLKYSLEGHQFAVFAFCLTSDMRYMVSISTHFITFDLSTSDLTRDVNPGIEGIMQQLVLSPDNKWAAAYSNNNQTVLLNMLSSEFVVINSPFEESHGPVSGLYLLNQNLFITCKLRWAQFDTRGNLVDTFDVPGENKDWEILTMEFFNPADYNVVFWSGSINDMRLRLDSCRGGHYSNCQLLFSAMVMNKARTRAYGCANEENFEVSVFDFIEDEVTGDICWTLVESLPRFENDDKEMLLQLRLDQHDRMLLGTAGKGFVIWDFGSKDKDAAEECRLREGALYLALPHGVRNITTRIMQSNSIMVSSKLDYAVAGVRKNLYVWCLQSGQLAKVLDAHFGRIIQLEPLTIGNWNNLVTSSIDRSVKVWNINNIFEKVHVIDRHELQIDDISLSEVDMAVTVTRSCVGVWETRSGRLLAKLADSPLGAIVTHAEITPDGRYIISSETGKFLVWNRVSEQVVFRDDQPGIQQITLMDYGYKVLTVSVPNINQRDILAAAAGGSADEANRLTAITTMRSVPEGSIFFRFEFPIRMITGMPFRQSVITADNAYIVVVTVDKSNKDCLGVYSATNGAFVSKVLLKGCSIKEVISLVPMPHKANQVAVISSEKGSVMDIKTKKHVRSIAKWGGSITRDGKCGLYAPTRGGLEMLELRKGTTVKTFIPKVAEGVFSVICIFTENDEYVAYYHSGRKTIRVFRTADTEMIANYRLQAELTAIKSSKDGRAIVLGTVDGCMSVLAIVDPKKEEMNEYLNDLPSRDENWKAKLAKMKARVGFKAAIRVATISSRYAKTSKGGEDGEEELLTEITEDIVVPVAD

SEQ ID NO: 42376 - DNA, 7058 bp, DROSOPHILA
ggaacaagtgtccacgcaaggatgagtttgatatgtagtcaagcgacgtggatattgccacagaacggatgtgggaagatgtatttgtatgtacattgtataaagtgaaaataaaaaagttgtttttatgaaataaaaccaattattaactatggaatattaactaatttcataattgaaacacagctaggaaaacacttgcttctagattttataaatattaaacatttattggagcgagcttcatttattgcgcagattagagggattaggaccagttctgagtcccctctcaacacataaacacttatagcgaggattggaatggtaaatggttagagttatttaaacttatatacaaagttcataacgtcagtagggagcacatcaaaaatcaaagatgctcgtaaacgggcttagagataataaagttgggcaatctcgatgaaatgtcattccttgtggttatatatatttatatataaacatatactctcctaatcctattttggataaacgcttttacattgcattttcgttttgggtatacaataaatattgaataggtttatttattggaagaagtaaaattcgaaaacactcacacttactgtaattaatcttttgtccgaagtaaaattggtttaaaaaatatataaataatggtaataaataattggttaactaaattactaaacagtttgagattcattggattgatagcgagtccgtaggaaataccattaagtacagtacgtttgcttaaattaaagataacatttgcgatattgagcctaaaatgggcagtacgatattgggattgtagattttcgaatggtataggtacagttcaacaggtatggaagtacatttccagttcccctcattgcccaagatcaggcttccggttatgacttcaagaaggtttttatatcgattggaatgatagtggtttcaaatgattccacatttagatttcgacttcaggcgtgaactggcgtcagaagtagatctcctcttcctcgggcttggctcgaggagctgtgccagtggccacagcgattcctgccgttcttgcaattcctgtccggctgctcgttggagtgcgagtgtagtgggccaccgattctgctcgagctacgggggtctgggtgggagttgcggtggtcgttgcctgctggatgatcgccggcgagcttcctgttcgcgagtgctgcggcaccattcccgtcgtgggcgtcgttgtacagttcgagggcgtggctgtcctccggtcagccaactttagagggaacatctgctgcacactgccggcggagatgtagggtgtcggtgatgcgctattaaagctggcggacttgtctacgcgggagctagaagtgccgctggacgagagcgaggagagcttcatgggcagcttttgcttgaccagagtggggttgactttgggcgcattattggcgctgatcaaattcacaggcggagttttgcagctggatgagccactcagccatttctccttacgtcgatcaaaggttccacccacactgggcgtgctgctgcccgtcccacttccacttaatccattgtctgtctcgtggctgtcatccaacagcgcagcaggtggaggatgattgttgctgaccggtggcaggggagtgctgggcgacagcaacagaccctgactggagaggagctccatcttcttgtacagctgttcacgctgctggcgcacatcctcctgctcggctttgatctgtttctgcaactgcagctgttgtgcccgcatctcggcgagttcctcctgttgctgcttcagctgacgctgccatgcggtcttctcctcctgctgcttgtcctgcaggttacgcagctcctccaattgatccttgtgcgtgtaggcactcgagcgaggactctccctgtaaagggccagctggagctgcaggttattgatggtggtcatctgctgggagatgacgcacagcagagtctgcagatggtgcgtcacctgtagcaccgcatagttgttctctaaaggctgctccgacaccgagctggacccactctttggttctcgcttctcttccaattcctgaaggcggggtgttagcactagcttggaggccagcttgccgcgcttttcgtcgaagccagcaaatgtttccgcccgcttgggcagagtgggcgaagcgtactgctcactctgcttttcgccgacactactcagagtcctgggcaccggctgacctgtggccgccgagtagatcgtggaagccaactggctgatgtcctgcaccgtgttgagcactctgcgccacagctccgccgtgtcacagtcggcactaacgagatccttgtatgagccgaaggccgccaggaagttggctgcactgcaactggaattggtgccggccacatctccaaagggctgctgctccttgagcaaattgaattgaagcatcagtttctcctccagcagtagcgcctgttcaatgtccttttgtcgcatcttctcgatggtctcccttttgttcactccgattcgcagcttctcctccgccgtgagatcctccgcctcgattatgtccgttgcgggacagtcaagcacagcctgacggatggtctgaatccaagtgttcttgtcctttggcgtctgcactttcagctcgtacatttctgggaaatccggattggaactgataatatatattccccgggattcggtgcctgccttttcgcggataagcaatttctggagaggaaccactccagccttgtgctccggcgtgaagaatgagtacttgttgtgaccggagttctcgctcagaaagcacaggcagtcggtgagcaccacaacaaggacaagctgcgtcttagccctgccctgcatgagggtggccaatccatcaaatttcagacgacgtcgcgactccacaccaagctcagtttttcggaaaggcttatttttgtagatagcaaaggatttggcatccacgcgaccatagatttccagctgtcgttcgcgcagctctttctccgccacacacgcatccacatcgaccagaagagatttgaccaggttgagggcatgctgaagcttgtctgtctccagcttgttatccctggcgctcttcagcagcggctcgatgagcaacgggtatttggtaaggcgctgagtcacgaacaagatgcattcggggatgcccttcttcttaagcaacggattctgtagacagtgcttgtaccattcggcgaagcttggctcggttagacagagcttaaactggtccagggcgctgcgatgattggcgcagaactctccgtaggccagacgcaggcattgcgcctgctccagcgagaagaaatcgagcaatatgtccgcgatgctgtccaccatatgctgttcgcgttgcttcagtcgcaactggcgcaggaagcaggtgtgcagatcggtgagctgttgcaggcgcggaaacatgctgtttaggttgagtgatggaaagtgccgctccagactctcaacgaacaccttctgcatgacgatcagtgtctggcagtggtgtttctcggtcataatgaactcatagatatgttcctgccgcttgatctgcagatccttcagcgtcttgagtaactccctaggcacattgggtgtccaggagtcgtgctccttgagaacgatgcctagaacgggatcggctcccaagtcttgtgcttcgatcggcgcttcgttgagaaactgcaaatcggaacgtatcagaggctgatcctctgggttgctaaaagtgctcgcatccggcccgtcgtagtaatcctggccgccgcccattttcttcaccttgcactcaaggtgatgttccttgatctgcgccagtgtgattgcagcaccgcagacgtcgcacgcactaagctggcctcccaccaacgacttcgttttcgccttgggcttctttttgcggaagaatatagaaccgcgcttgggtcgcttctctacggtgtcgtagacctcgatttttgcgtgcgcccgcaagaggctttgattctcatcctcgctgtccgtgaggtggcgcgcgatcgccttgatatcctccttggctataattgagctcgtcgatatgcttttctgcagcggtattctgctgatgatctccgttgccaggcttcgcttggcagcaatcctctcgaagtcacgggccagctccgcctcgtttagcgaatgggtcgaaatacctgcgagtagtcaaagttagagagtcggtccgttagcaataactaatcgcaaggggtttctgatagctttggtcggagctaccaataccaaaacactatatgggcttacagataagggggttttgtggaattccacatcgaaacgaagctaacttggtagtagcccctactctttggttgagtggcatattattttgagcaatcaattggcaaaatttattgactttattaacgatatcttatcatacatattttcccattttttttccgcgagtcccacggtcacacctctacaatattctacattctacaataatttaagattagggcttgtagtttctagtgaatctgcttggaacagagaagttattctgtcgaaaggtcataacttttcacttggagccatttaagtttagtacgttaccacggcaccatatttgaaagctattgaaatcggattgtaaagctaaatgggaagaattttcattatactggaggcataatttaccatacgatgcgtacataagtacaagcgaatgtttcattgctcactaggagaatacgagatagaaaattttcaaagagtacccggatgcgtcctttaagttcagataacttaaaatcctttttagaagatcaacagataaacctaataaatcaagtttgcttactagaagagaattatttataaagacaaatgctttactaaagtcagtgtagatgacacctgtttgaatattatttctgaagccctgtattacgaaggaagttagctccaaaaggttattggttgtttatctgcgtttctgctgacatggtgatataattgacctacaaaggcgctgcaaatgagtagtgataacattttcaaaaacctttggaatagccgacaatttagagattcctctgtaaaatccatttccgacttaattttgaatgcatttttgtttagtattattttaaactttcaacacctaaacacttttgtctaaataattaaataatattggcaaatttacctaatcaacagggccagccatgttgcaggtatacaaatatctgaactactattgcattgcacacttatggctttgccaacccacccccgaaaccttagtgcatatctacctccagtgctgttcctggccgaccttcgtcgctgctcggtgacgcgaatggtttcctgctcctcgctgtccaggctggataggctgacgctcttgttggtgcagtcgccagcgccgctgccatcgtccacggctgtccaggatttccggcggtctgtgtgaagaaactggcactgctgcggtgccgtggaagaccacatggcgtagttggagccaccggacgcgggacccgtgcccgtccccgtaagatcgggcagcgaagtactcagtatagctgcgctgagcagtccatgattggccaagctgccgtcctgcatgtgctggctaggcgaggaggagttcttcatctggacgaccgtttcgcggatgttctgcagctggctcagcgtgtcctcgaatatgttgttgtacttggaggccagggcgggactgtgtggcgtcacatttatggtgggtatcatgttgttgttattgatggtgttgctggcaggattagatgctggtggcggagcaatgggggcgcgcgctggaccaggaacgggtgcgtttattacgggtatgcaatagttctggctttcgatggaggcgcctcggttggtagagccaccattaaccagcgcttccgaggactcgctgcagttggagttcagaaaatcggtgaccacatcattgtcgctgtcctcgcccgcgttgtccataatagggtctactgaattctctgcgttttgggccaatttcctttgtttagcgactgtgttctattttacagctggctgcctagaaaaagaaagtttcagtatacaacgcacacacactcaaccgcgacgggcaccatacatgcatatatgtgtgtacatacgtacatatacacttgtgtatgcacttgctttttgctatttattgattttcccgccacccccgaaaacaccttgttgcgcgacgtaaattgttgcgcctttttcgaaggacgtcacttgtccttgcaccaacaacaaccacaataacagcagccacacaacagcagtggaagcaacaacagcaacaacaacggcagctcagcagcatcaacagcagtgcgtgggcgaggggaatgcgtgagttttaaacgataaattcgaacgggtgcttcgcgtgcgggaaagggaatactggccgttgcacttaaccgaaaactaaacggaatcttaagctagtgagatttctgccagcgttttaaaatttaaatgcgattcgagctggggttggaacttatatcgatgcttacccgatactatcgccagcagtcgggcagtgtgaccatgacggcggcacactttacatttaacagcgctgtcgctaacataaccagtgctgaaaagaagcgcccaaccattccgattccgattaacaacactacatttgaattcaaatttaatcctaactatgtaacggaaatcaaaatataattaaaacagaagaacttttgtctttattcgacgaacatttattgaaagtaaaatgatggccgtgcgatacagtacagggctacagttacgctacagttacaattgaatcgcaagaatggcgttactagttggtaaacgcgtgactgtgcgcctggaatgtgcattagttagtaggtagtaatatgtattagtatcactctgaagcaaccggcaatccgaatcgctctagcccatggtggtggccaggtgcttg

SEQ ID NO: 42377 - DNA, 3930 bp, DROSOPHILA
atggacaacgcgggcgaggacagcgacaatgatgtggtcaccgattttctgaactccaactgcagcgagtcctcggaagcgctggttaatggtggctctaccaaccgaggcgcctccatcgaaagccagaactattgcatacccgtaataaacgcacccgttcctggtccagcgcgcgcccccattgctccgccaccagcatctaatcctgccagcaacaccatcaataacaacaacatgatacccaccataaatgtgacgccacacagtcccgccctggcctccaagtacaacaacatattcgaggacacgctgagccagctgcagaacatccgcgaaacggtcgtccagatgaagaactcctcctcgcctagccagcacatgcaggacggcagcttggccaatcatggactgctcagcgcagctatactgagtacttcgctgcccgatcttacggggacgggcacgggtcccgcgtccggtggctccaactacgccatgtggtcttccacggcaccgcagcagtgccagtttcttcacacagaccgccggaaatcctggacagccgtggacgatggcagcggcgctggcgactgcaccaacaagagcgtcagcctatccagcctggacagcgaggagcaggaaaccattcgcgtcaccgagcagcgacgaaggtcggccaggaacagcactggaggtatttcgacccattcgctaaacgaggcggagctggcccgtgacttcgagaggattgctgccaagcgaagcctggcaacggagatcatcagcagaataccgctgcagaaaagcatatcgacgagctcaattatagccaaggaggatatcaaggcgatcgcgcgccacctcacggacagcgaggatgagaatcaaagcctcttgcgggcgcacgcaaaaatcgaggtctacgacaccgtagagaagcgacccaagcgcggttctatattcttccgcaaaaagaagcccaaggcgaaaacgaagtcgttggtgggaggccagcttagtgcgtgcgacgtctgcggtgctgcaatcacactggcgcagatcaaggaacatcaccttgagtgcaaggtgaagaaaatgggcggcggccaggattactacgacgggccggatgcgagcacttttagcaacccagaggatcagcctctgatacgttccgatttgcagtttctcaacgaagcgccgatcgaagcacaagacttgggagccgatcccgttctaggcatcgttctcaaggagcacgactcctggacacccaatgtgcctagggagttactcaagacgctgaaggatctgcagatcaagcggcaggaacatatctatgagttcattatgaccgagaaacaccactgccagacactgatcgtcatgcagaaggtgttcgttgagagtctggagcggcactttccatcactcaacctaaacagcatgtttccgcgcctgcaacagctcaccgatctgcacacctgcttcctgcgccagttgcgactgaagcaacgcgaacagcatatggtggacagcatcgcggacatattgctcgatttcttctcgctggagcaggcgcaatgcctgcgtctggcctacggagagttctgcgccaatcatcgcagcgccctggaccagtttaagctctgtctaaccgagccaagcttcgccgaatggtacaagcactgtctacagaatccgttgcttaagaagaagggcatccccgaatgcatcttgttcgtgactcagcgccttaccaaatacccgttgctcatcgagccgctgctgaagagcgccagggataacaagctggagacagacaagcttcagcatgccctcaacctggtcaaatctcttctggtcgatgtggatgcgtgtgtggcggagaaagagctgcgcgaacgacagctggaaatctatggtcgcgtggatgccaaatcctttgctatctacaaaaataagcctttccgaaaaactgagcttggtgtggagtcgcgacgtcgtctgaaatttgatggattggccaccctcatgcagggcagggctaagacgcagcttgtccttgttgtggtgctcaccgactgcctgtgctttctgagcgagaactccggtcacaacaagtactcattcttcacgccggagcacaaggctggagtggttcctctccagaaattgcttatccgcgaaaaggcaggcaccgaatcccggggaatatatattatcagttccaatccggatttcccagaaatgtacgagctgaaagtgcagacgccaaaggacaagaacacttggattcagaccatccgtcaggctgtgcttgactgtcccgcaacggacataatcgaggcggaggatctcacggcggaggagaagctgcgaatcggagtgaacaaaagggagaccatcgagaagatgcgacaaaaggacattgaacaggcgctactgctggaggagaaactgatgcttcaattcaatttgctcaaggagcagcagccctttggagatgtggccggcaccaattccagttgcagtgcagccaacttcctggcggccttcggctcatacaaggatctcgttagtgccgactgtgacacggcggagctgtggcgcagagtgctcaacacggtgcaggacatcagccagttggcttccacgatctactcggcggccacaggtcagccggtgcccaggactctgagtagtgtcggcgaaaagcagagtgagcagtacgcttcgcccactctgcccaagcgggcggaaacatttgctggcttcgacgaaaagcgcggcaagctggcctccaagctagtgctaacaccccgccttcaggaattggaagagaagcgagaaccaaagagtgggtccagctcggtgtcggagcagcctttagagaacaactatgcggtgctacaggtgacgcaccatctgcagactctgctgtgcgtcatctcccagcagatgaccaccatcaataacctgcagctccagctggccctttacagggagagtcctcgctcgagtgcctacacgcacaaggatcaattggaggagctgcgtaacctgcaggacaagcagcaggaggagaagaccgcatggcagcgtcagctgaagcagcaacaggaggaactcgccgagatgcgggcacaacagctgcagttgcagaaacagatcaaagccgagcaggaggatgtgcgccagcagcgtgaacagctgtacaagaagatggagctcctctccagtcagggtctgttgctgtcgcccagcactcccctgccaccggtcagcaacaatcatcctccacctgctgcgctgttggatgacagccacgagacagacaatggattaagtggaagtgggacgggcagcagcacgcccagtgtgggtggaacctttgatcgacgtaaggagaaatggctgagtggctcatccagctgcaaaactccgcctgtgaatttgatcagcgccaataatgcgcccaaagtcaaccccactctggtcaagcaaaagctgcccatgaagctctcctcgctctcgtccagcggcacttctagctcccgcgtagacaagtccgccagctttaatagcgcatcaccgacaccctacatctccgccggcagtgtgcagcagatgttccctctaaagttggctgaccggaggacagccacgccctcgaactgtacaacgacgcccacgacgggaatggtgccgcagcactcgcgaacaggaagctcgccggcgatcatccagcaggcaacgaccaccgcaactcccacccagacccccgtagctcgagcagaatcggtggcccactacactcgcactccaacgagcagccggacaggaattgcaagaacggcaggaatcgctgtggccactggcacagctcctcgagccaagcccgaggaagaggagatctacttctga

SEQ ID NO: 42378 - protein, 1309 aa, DROSOPHILA
MDNAGEDSDNDVVTDFLNSNCSESSEALVNGGSTNRGASIESQNYCIPVINAPVPGPARAPIAPPPASNPASNTINNNNMIPTINVTPHSPALASKYNNIFEDTLSQLQNIRETVVQMKNSSSPSQHMQDGSLANHGLLSAAILSTSLPDLTGTGTGPASGGSNYAMWSSTAPQQCQFLHTDRRKSWTAVDDGSGAGDCTNKSVSLSSLDSEEQETIRVTEQRRRSARNSTGGISTHSLNEAELARDFERIAAKRSLATEIISRIPLQKSISTSSIIAKEDIKAIARHLTDSEDENQSLLRAHAKIEVYDTVEKRPKRGSIFFRKKKPKAKTKSLVGGQLSACDVCGAAITLAQIKEHHLECKVKKMGGGQDYYDGPDASTFSNPEDQPLIRSDLQFLNEAPIEAQDLGADPVLGIVLKEHDSWTPNVPRELLKTLKDLQIKRQEHIYEFIMTEKHHCQTLIVMQKVFVESLERHFPSLNLNSMFPRLQQLTDLHTCFLRQLRLKQREQHMVDSIADILLDFFSLEQAQCLRLAYGEFCANHRSALDQFKLCLTEPSFAEWYKHCLQNPLLKKKGIPECILFVTQRLTKYPLLIEPLLKSARDNKLETDKLQHALNLVKSLLVDVDACVAEKELRERQLEIYGRVDAKSFAIYKNKPFRKTELGVESRRRLKFDGLATLMQGRAKTQLVLVVVLTDCLCFLSENSGHNKYSFFTPEHKAGVVPLQKLLIREKAGTESRGIYIISSNPDFPEMYELKVQTPKDKNTWIQTIRQAVLDCPATDIIEAEDLTAEEKLRIGVNKRETIEKMRQKDIEQALLLEEKLMLQFNLLKEQQPFGDVAGTNSSCSAANFLAAFGSYKDLVSADCDTAELWRRVLNTVQDISQLASTIYSAATGQPVPRTLSSVGEKQSEQYASPTLPKRAETFAGFDEKRGKLASKLVLTPRLQELEEKREPKSGSSSVSEQPLENNYAVLQVTHHLQTLLCVISQQMTTINNLQLQLALYRESPRSSAYTHKDQLEELRNLQDKQQEEKTAWQRQLKQQQEELAEMRAQQLQLQKQIKAEQEDVRQQREQLYKKMELLSSQGLLLSPSTPLPPVSNNHPPPAALLDDSHETDNGLSGSGTGSSTPSVGGTFDRRKEKWLSGSSSCKTPPVNLISANNAPKVNPTLVKQKLPMKLSSLSSSGTSSSRVDKSASFNSASPTPYISAGSVQQMFPLKLADRRTATPSNCTTTPTTGMVPQHSRTGSSPAIIQQATTTATPTQTPVARAESVAHYTRTPTSSRTGIARTAGIAVATGTAPRAKPEEEEIYF

SEQ ID NO: 42379 - DNA, 3218 bp, DROSOPHILA
aaccattgcgtctttcctggcggcgtcttcgatcctatagaagatcaatctgcgaaatggataacttttttcaaatcctttggggtgaccgatgaacaattaaaaatgtgtaggcacaatcaggattctccaaggcctgagtttctatccggtggagaccatatttcaagggacattgcactgcgactgactgcgctcagggaaacctttgaagaggtgggcatcttgatttgcacagaacaggacgacatacaaaaatgggattctaaatcgggtcatcctagaaccgtgcttctcgagtcaagcgaacacttcgaatggcaacatcgggttcacaatgatgcctcacagtttctggaactctttcggcattataaagtcattcccaatatctggtctcttcaggaatggtccatttggaggacagcagccactgccaatcggaaatatgacactgtttattatatcaccatgttagataagtacaccaggaatataaagctgcttctggaaccgcacgaggtggcttcggcccactggttgagtccgatcgaggcttggtcgagctcacagaaagccattatttggctcccgttcatgctgctctatgacatcgctcgtctgatgaacttctatagctttcaggagcttctcaacttctcccgccaaaggagctgcaatggaagcacaatggtgcagcccgtctactatcgctgcgatgactgcatgtttggagttcttcctggtgatgagctctatcccaaagaaccaggcgcttgtacacaaacaattatcttgtcgggatcggtggacgaccttcatcgaaagtccaagcaatacaatcgctatatcgtctacgacttccacaaggtcgtactggcctccaatataccgccctgcgatgggcatctgccactgcagcctcttgtcaataacaagctagccaagttgtagtaaaagaatatagttttaatagaaaatatatatatttcctcttgcgctacaacaagttaccactatccaactcggtctgtatggcgcggcatgcgtggcacaaaccgtccttgttctccaatcgcttcttggccaagccctcgagatcttgtccgcttttgtacaggctcacgccggcctctgaaacagatctggagtactcaatagccagcagagtgtcggatagttcggagtccagtgtagatcgacagtgaacacaagaggactgctctggattggaattgacagctattttgtcgccagttcggaacactgtggatactgtggaggcgaagttttgctgcagattggccacaaaggctgatgtaaggttctgtaagctggcagtctcaccatgctccatcccataacgtgagcctttttgaaaatgtggctttagacgctgtgcatgtatgtaaaattgaatctcctgctcagttaggtccttgagaggtcgcagcagcttaacatctccagacagccgatcgtcgaggagagccacatccaaggcggcactaccgccacgacctagcgctattgcagtcagcagctgggtggctaagtcaacacttatattagattcaaagacgtgagtacattgcagacactgagccacggagcagatgaggttcttgcgctgttgctggaggtaatcctggcgagctgtcagacttcgcagtttttgaagcttgtggataagctcattgtttgcgttgaggaaaggactataatccttgatccgctgcaaggagctgggcaaggcgcccagttcaatcacatagaaatcgaagggtgcgtattgtgttgataatctctgcagagcttccaagtccacaggatcgcgaccttgcacttgctgctcctccacgtagaccacacgtgcgttgcaatggagtcttttaaacgtgttctgtgtttgcgcgaagtgcaacatgtcgagcagaacgagcgactctgcggacccgtccaggacaagaagcacctcggcgtttctgggcagaatcttggcggctcccagagctgcccgaaacttgtgcctcgcatacgctagaaagcattcccggcactccgcagttcggaagttgagtttgtagagctcgccggagtttacatcgcatttgctgcaattccctggactgaggacgattcctaatggtagggattccactaccatggcgtgggcggcaccctcgtctccaaaatcatcttcaccaatgctgcacatggcaataatttacgtctaatccacaacaaaaagaatttcgcagataaacgaaatgaccagggatgaatacgttgtgaaatgaatggatacaaaatagcggaattctagacaaatgtcttctatctataatctatctatatagattatctatatttagtgtcaaaattagacggcaagctagcgctttcttataatataatatcgaatataatatatccaatataatttaaaaaagcgtaaacctttaacttatattttaaactcatatattacctttagctacggtatagtctatagctgtcaacactgtttcgagggcattccgttatcgaaggctatcgatatacctggcaatatatcgactacgcagcctagactcgtcaaaagcaaccttgcaacaggaaaagtgcagtgaaaaatataaaaatagctgttcaaaccacaatttgttgtacaaatcttaataataagttaaatttaagcattgaggtatgtgtctttggagtttgtgttgaaaaatgggctcgaaaaacccaagaaatttgggcgcaaaaaactgggtgctgctaatacgtatgtatgtgagttctgcgtgcctgtgtgtttgtgcgcgctgtgtgtgtgcgtcgtgcttgtacgcaagcaaaaagtatcgggtagcaaaatcgagaaactttcttattgacgatagcagatgggaagaagaagcaattaaaagaaggaaggaaaaagtacgacaaaaagtaaaataaacgccgaaatccaatttcagagattaaaagcagaagcaacggcggtaacaggaagtaagaagttcacccaaatcgcaggagcacagtcgccagagcgacagaggtcatcttaaaaataatttttcgggcgtgtttgccccccgagcacgattaaccccccacccagattagcgcagaccaacgcaagaagcccccaaccaaaaaacaaaaacaacagcagcagcagcaagcagtagaaacaacccgcc

SEQ ID NO: 42380 - DNA, 1218 bp, DROSOPHILA
atgtgcagcattggtgaagatgattttggagacgagggtgccgcccacgccatggtagtggaatccctaccattaggaatcgtcctcagtccagggaattgcagcaaatgcgatgtaaactccggcgagctctacaaactcaacttccgaactgcggagtgccgggaatgctttctagcgtatgcgaggcacaagtttcgggcagctctgggagccgccaagattctgcccagaaacgccgaggtgcttcttgtcctggacgggtccgcagagtcgctcgttctgctcgacatgttgcacttcgcgcaaacacagaacacgtttaaaagactccattgcaacgcacgtgtggtctacgtggaggagcagcaagtgcaaggtcgcgatcctgtggacttggaagctctgcagagattatcaacacaatacgcacccttcgatttctatgtgattgaactgggcgccttgcccagctccttgcagcggatcaaggattatagtcctttcctcaacgcaaacaatgagcttatccacaagcttcaaaaactgcgaagtctgacagctcgccaggattacctccagcaacagcgcaagaacctcatctgctccgtggctcagtgtctgcaatgtactcacgtctttgaatctaatataagtgttgacttagccacccagctgctgactgcaatagcgctaggtcgtggcggtagtgccgccttggatgtggctctcctcgacgatcggctgtctggagatgttaagctgctgcgacctctcaaggacctaactgagcaggagattcaattttacatacatgcacagcgtctaaagccacattttcaaaaaggctcacgttatgggatggagcatggtgagactgccagcttacagaaccttacatcagcctttgtggccaatctgcagcaaaacttcgcctccacagtatccacagtgttccgaactggcgacaaaatagctgtcaattccaatccagagcagtcctcttgtgttcactgtcgatctacactggactccgaactatccgacactctgctggctattgagtactccagatctgtttcagaggccggcgtgagcctgtacaaaagcggacaagatctcgagggcttggccaagaagcgattggagaacaaggacggtttgtgccacgcatgccgcgccatacagaccgagttggatagtggtaacttgttgtag

SEQ ID NO: 42381 - protein, 405 aa, DROSOPHILA
MCSIGEDDFGDEGAAHAMVVESLPLGIVLSPGNCSKCDVNSGELYKLNFRTAECRECFLAYARHKFRAALGAAKILPRNAEVLLVLDGSAESLVLLDMLHFAQTQNTFKRLHCNARVVYVEEQQVQGRDPVDLEALQRLSTQYAPFDFYVIELGALPSSLQRIKDYSPFLNANNELIHKLQKLRSLTARQDYLQQQRKNLICSVAQCLQCTHVFESNISVDLATQLLTAIALGRGGSAALDVALLDDRLSGDVKLLRPLKDLTEQEIQFYIHAQRLKPHFQKGSRYGMEHGETASLQNLTSAFVANLQQNFASTVSTVFRTGDKIAVNSNPEQSSCVHCRSTLDSELSDTLLAIEYSRSVSEAGVSLYKSGQDLEGLAKKRLENKDGLCHACRAIQTELDSGNLL

SEQ ID NO: 42382 - DNA, 3264 bp, DROSOPHILA
gggaaatttgacagccattgttaacgcaatccagggtcagaatgaaaactctattaggaatcttaccaaagtggagctagaaatcaggaaagccctggaacaagtggctgccaatcagaacaaatacgagcagaacctaaatgaagtggcctcatccgtcaactcgcatctgtcggagattcagcagctgctatcacaggccgtcataggggaactcatcggcttggacaataaagcgaaggtcctccaggagcagcagcgcaacatcgtgggtcaagtgggatatctgggcgaacttaaggctctggcagatcgtgccaatcgcaaagtcaatcaattggagtggggtctggtcattctcaaccgcactcagtccgagagcctcaacagcatcgagcacactgtccatggagtgcaggtggccacctcacaggtcgatcataaactggctgccctactgaacaatcagaagaacattgaaaggacgctggatggctgcaagcacaaaaatccgtcacaccagaagccccacgagatctggactcacccggaacacgcaccaatttacaagtaagtttgtatgccctacttctgggtgcacactaaaaccactcttttcattttaaggccaaaaccagagggcaatcaaggatacgagaacgtctatgcatcccaagaagaggctgaatacctatacaaactttggtatggaaagggccagtagcattaatacgaaaactgaagatagatgttttatgccatattcagaaattgcttgatttcctatatcaaatcccagcatgtcgattctatctatcttatataattgtatattaaaccgttctgtaacacaatgtaataaacaagagtaaatggaggaaatcgaactttataagttgtatattgctaaaaagtgttatgtccaactttatatatcaattgttggaaaacttataaaactagataaatgcacctgacatagaggaaaccggctctacctctataattttgttggatccaatggatgaacctgaccatcatcccgctcaaacttaattatcagctgcgactgatgctggttccagtgctccgatcgatgtaatttagcattcgtcttcgaacggaattcctcgactgacaaatcgatctcaattttttcgttacttgcatccggatcggcggggtaagcatcatctcctggcaagagatgcactaatccatttgtacacttgtgcactacaggatgaatcagctgaatgcctttgacctcacgctctgctgcaaactgacgcaggttatctaaagaggagaagtttaggcagcgcgaaagttcatagaattgtggaggcggcagccagagttcttttcttaggctcgcttgaaggtagtccaatggggaacgccactacaataatataaatgatagtacattaaatgcaacttaaaggtttcgcgtatcgctcttgtgccgtataatatcccacccacctaccgcagaatccttgacctcattaggttcgatgtgaaccctgggttcctgttccagggcagtcataaagaaggccgtctcgaagcgcttcttaaacgtggacggcgtgcgccagacagaccactcgtgaagtgaccagacatctggaagcacatccagctgcttgcagagctccaggaactggctggcattgttgtggacgatgtgctgccagtgggcgcggtcaaactggtcatagaacgctccataatcgctagtggaggtcaatgatttgctgtccctgcacagcaggatacccaactcctcgaaggtttctcgtatggcagtcagccgcagagctagggatctgttaggtgcgaaaataatgttacatcaccaatttcctaaaaacctatttgagttgcatacggatccagcgatttcttatctgccttggtgtggaaaatatccggacgtggacccttcacgtggcccacgttccgcagcttagcggcactgaactcgtttctctgaaagtgttccaaccaggcaggcgaactgtccgaggcatcgcaaactccgccaggaaacacggatgactccggcatgaaagtggacttctgcgtgcgtgtaaggaggagggcctagacgaatagattacgtcagaatggtgaagctaagttaacgttaagctgcaactcacattgtaatcacacgacgtggacttttcaacttggttcttagccagaaggattaaacttgaggaggagcgaattttgggcaaaagcctcgacatatttaggtaacacagcgatatcgatagagtgggtggtaatatcgattgctcaccagctgattttgtttacacttttgaaatacccaccacctgttgtagtcagatggtggggtggggtagtttataattaaaagaacttctgaaattaatttaagtaaattattttattaagccaataaaatatttctaggtttatttattaatgtgagtacttatttaaatttcacattctatcactgaagtcaatgaaatataggattttaattcattccctcacctaatgtcagaggtatccgagggtcgagtcttttgactaatgcgttaaagcattaacaacaagctcttattgctttgagaccaaagatcaaaggtttgaaaaagtggatttggaaattaaatggattattgactataatgactactaaaactggaacttatagaccttcggctagccttattgtagccgccaaagaggattctttagaggactacgactacagagtatgttaagtataagattataagctctaaacgtttgctgactgattgtcttttattaaagttattgttgattaaacgaactgaaaaaacttcctatgcattgaaccattgcgtctttcctggcggcgtcttcgatcctatagaagatcaatctgcgaaatggataacttttttcaaatcctttggggtgaccgatgaacaattaaaaatgtgtaggcacaatcaggattctccaaggcctgagtttctatccggtggagaccatatttcaagggacattgcactgcgactgactgcgctcagggaaacctttgaagaggtgggcatcttgatttgcacagaacaggacgacatacaaaaatgggattctaaatcgggtcatcctagaaccgtgcttctcgagtcaagcgaacacttcgaatggcaacatcgggttcacaatgatgcctcacagtttctggaactctttcggcattataaagtcattcccaatatctgg

SEQ ID NO: 42383 - DNA, 1056 bp, DROSOPHILA
atgtcgaggcttttgcccaaaattcgctcctcctcaagtttaatccttctggctaagaaccaagttgaaaagtccacgtcgtgtgattacaatgccctcctccttacacgcacgcagaagtccactttcatgccggagtcatccgtgtttcctggcggagtttgcgatgcctcggacagttcgcctgcctggttggaacactttcagagaaacgagttcagtgccgctaagctgcggaacgtgggccacgtgaagggtccacgtccggatattttccacaccaaggcagataagaaatcgctggatccatccctagctctgcggctgactgccatacgagaaaccttcgaggagttgggtatcctgctgtgcagggacagcaaatcattgacctccactagcgattatggagcgttctatgaccagtttgaccgcgcccactggcagcacatcgtccacaacaatgccagccagttcctggagctctgcaagcagctggatgtgcttccagatgtctggtcacttcacgagtggtctgtctggcgcacgccgtccacgtttaagaagcgcttcgagacggccttctttatgactgccctggaacaggaacccagggttcacatcgaacctaatgaggtcaaggattctgcgtggcgttccccattggactaccttcaagcgagcctaagaaaagaactctggctgccgcctccacaattctatgaactttcgcgctgcctaaacttctcctctttagataacctgcgtcagtttgcagcagagcgtgaggtcaaaggcattcagctgattcatcctgtagtgcacaagtgtacaaatggattagtgcatctcttgccaggagatgatgcttaccccgccgatccggatgcaagtaacgaaaaaattgagatcgatttgtcagtcgaggaattccgttcgaagacgaatgctaaattacatcgatcggagcactggaaccagcatcagtcgcagctgataattaagtttgagcgggatgatggtcaggttcatccattggatccaacaaaattatag

SEQ ID NO: 42384 - protein, 351 aa, DROSOPHILA
MSRLLPKIRSSSSLILLAKNQVEKSTSCDYNALLLTRTQKSTFMPESSVFPGGVCDASDSSPAWLEHFQRNEFSAAKLRNVGHVKGPRPDIFHTKADKKSLDPSLALRLTAIRETFEELGILLCRDSKSLTSTSDYGAFYDQFDRAHWQHIVHNNASQFLELCKQLDVLPDVWSLHEWSVWRTPSTFKKRFETAFFMTALEQEPRVHIEPNEVKDSAWRSPLDYLQASLRKELWLPPPQFYELSRCLNFSSLDNLRQFAAEREVKGIQLIHPVVHKCTNGLVHLLPGDDAYPADPDASNEKIEIDLSVEEFRSKTNAKLHRSEHWNQHQSQLIIKFERDDGQVHPLDPTKL

SEQ ID NO: 42385 - DNA, 3442 bp, DROSOPHILA
tgacacaaattgttattgaaacaacaaaagcttaacataccttgcttaacaatattagttgccccatcctttgaaaactattttcagcaacaatgatatttaccctccattcccaatcttcgctctgccgtgatacttgggggggtgctcattaattacactccataatggttacttccgctgggccacataatagcataattaatcgatattaaatgaacagcagcaggacaataaacgccggaagccagccacaaaaggttaaattaaacgaagtaattgttacacagcctcagccgttgaaactcgaccccctctggccgtttgtaaggtcctgaggagggttgtcctgcctgggtcctttacaatgcataataaacagtcgagcgggcacggagcaaacaaaagtggggaacgaagctcgttgagattttgatttttaaacggcacgtcggggggtggatgcgctggctggctggttgggattcagaagacaaggctgtaaagcgcacaaagtcacacggcaggtggcgatgaacatgggaagagtgggtgggtgtctcggcacacaaagtgatttaaatgcatttctaatgggatgaaattatatactgtctgagccaacacaagctctcttcaactccattctcattcctactctgatttgcggttttcaaggggcggacataaatatgcatgaatttgcgcttttgatgtgctagccataaagagtttattcccgaacgggaccaccttcatcttaagctaagtgcctttacttaactttaaattaaactgtacattttttaattaaaattgtcccataaaataataattaatgctcttaggagacaccgtcgtgataatttgatggccagctaaagccgcttaaaataatttcaaaacaccaatttgtgactgccccatttcaggattcacatttagcatcttatcagagcttagcagctggggtcaccacccgtccagctacggaatgtgattacagcttttggcgctccgcctgaaatttcagcggtttcaagtgtccatttggcggcgcaatatttaactccaagtttcgaacaccaggaccataggtatagcgatgcagatgctttgaacgagccctaaactcttcttctgatcccggaaaactgattatttcgtgaaccaagtgaggttcgggaacatagaagtcatcgcctaaggtaaatgattatttaaaaaaaatgatttggatattacactgaatattcctttaacataccaggtaagacgaaaaccatagagccctggcagttataaccaatcggcaagaacatggtcgttcccaatccgctgcgcttgatggcaaattccaacagggattgatacgccttaattcccatcaaccgggacaattcgtagacctgtggtggcatgaaccaaacattgcccaaatcagccagtcgcagcagttcaacgggtgtcagccactatatacataaataactcgtttattgtgaatttggggtttaaaagataaaccttaccagcgtttccttgacctcggaaggttcttccagcaattcgggctgcttgtccacaaaagccatgaagaaaacggtttcatgcctattaagtgtaatataatctatattagaaccaagaactttaccatactttttttagattactaagcaaagaaattaagctttcatttatgatttttttgtgaccccatacccaccctttgcgtatgaatcctggactcgcccaggcagaccactcatgcagagcccacaaatctggaactacatttagctcgcggcagagagttagaaactcagccggcttgttgtgcacccttcgctgccacgactccaggtctggaacagcctgagcgcaagttaccgcaccaaaatccagttgactccgactccggcaaagcaacagacccacctcttcaaagcattccctcacggcggttagtcgcagcgtaatctccctaaaaagacaaaggtcatagattaaactcccaatgtgacagagtttagcgcaacctttggactcaccgagcccaaatgcgggaacgcttaaagaaccgatcgtagcagccagtgccctggggcgccagaatggcaggacgatcttcgcggatgagaaccaggcggcgtagtgcctcttgtggaacaccaaactcctcgaggtagtgcagccaggcgacgctttcatcggccccagagtccaagaggccaccgggaaatacagtctgattgagcgcaatcgccgtggcatcactgcgttttagcataagcacctgaaaggtcaggattatggttatccgcttttggaaatggcctcttcactttccttgtaatctttgttattgccatcatctctggacaccaggattacactggccgaggtgcgccacttggtaggagatgcaggttggctcatatctgcttttatttagccaaatgagtagcaaaactgtttagttccatccacaaagaaaacgaaatcaaaaggttgttttgttccctccaatcagctgattggtcgataggcacgataacgactcctgtgcaaaaaaaaatcgatcgatagccgcctaatcaaagcgctgaatatttgaagtttgaattcgtgcgaaattcaaactttacctttttggtcagattaccatgcagaagcgagcacgaagagcaaaaaacccaaatagattagttccaatccacacgtgttcgcaaacatatttaagctctgcccttggacaacaaaagacacttgcaattggtgtttccagtcgaaaacaacttgcagttgaaatgaaagtactgatcacgttcttctttctgggcgcctgcctctgcggcatccaagcggatgagagcatcgctgacctcttgaaggacaatgcgaagggcgtacaggcagccaatgtgctcctgacccggattgcccaagtaagcgagcagactcaggtcggtttggcagagcaaaaggaggcactgaaggccctgacgctcgtggagaagctgctagccaagttgactgtcgttctggaggttggctcccacaatctggtggccacccttgagaacctctctaggcagggcgaggaatacggcaatcgaacggagtcagagctcctggaattggtgcgtctgcaggagggcaccaaggagatactcaatgtcctggaggccaagctggatgcctatcagaggcacgtgctccatagttcccgcaacattgacaacagcatcgacggactggccaaacttattactaggacggtgttgccacaattgaatgggctaaagtgtaccttcgatagcttggagacgtcccaaatcaacgtggaggtggagctgaagaacttggccggagtcaaggagctcagcgagaactccaacttcaagctgaacgtgctggagcatcaattgaagcagct

SEQ ID NO: 42386 - DNA, 1041 bp, DROSOPHILA
atgagccaacctgcatctcctaccaagtggcgcacctcggccagtgtgcttatgctaaaacgcagtgatgccacggcgattgcgctcaatcagactgtatttcccggtggcctcttggactctggggccgatgaaagcgtcgcctggctgcactacctcgaggagtttggtgttccacaagaggcactacgccgcctggttctcatccgcgaagatcgtcctgccattctggcgccccagggcactggctgctacgatcggttctttaagcgttcccgcatttgggctcgggagattacgctgcgactaaccgccgtgagggaatgctttgaagaggtgggtctgttgctttgccggagtcggagtcaactggattttggtgcggtaacttgcgctcaggctgttccagacctggagtcgtggcagcgaagggtgcacaacaagccggctgagtttctaactctctgccgcgagctaaatgtagttccagatttgtgggctctgcatgagtggtctgcctgggcgagtccaggattcatacgcaaagggcatgaaaccgttttcttcatggcttttgtggacaagcagcccgaattgctggaagaaccttccgaggtcaaggaaacgctgtggctgacacccgttgaactgctgcgactggctgatttgggcaatgtttggttcatgccaccacaggtctacgaattgtcccggttgatgggaattaaggcgtatcaatccctgttggaatttgccatcaagcgcagcggattgggaacgaccatgttcttgccgattggttataactgccagggctctatggttttcgtcttacctggcgatgacttctatgttcccgaacctcacttggttcacgaaataatcagttttccgggatcagaagaagagtttagggctcgttcaaagcatctgcatcgctatacctatggtcctggtgttcgaaacttggagttaaatattgcgccgccaaatggacacttgaaaccgctgaaatttcaggcggagcgccaaaagctgtaa

SEQ ID NO: 42387 - protein, 346 aa, DROSOPHILA
MSQPASPTKWRTSASVLMLKRSDATAIALNQTVFPGGLLDSGADESVAWLHYLEEFGVPQEALRRLVLIREDRPAILAPQGTGCYDRFFKRSRIWAREITLRLTAVRECFEEVGLLLCRSRSQLDFGAVTCAQAVPDLESWQRRVHNKPAEFLTLCRELNVVPDLWALHEWSAWASPGFIRKGHETVFFMAFVDKQPELLEEPSEVKETLWLTPVELLRLADLGNVWFMPPQVYELSRLMGIKAYQSLLEFAIKRSGLGTTMFLPIGYNCQGSMVFVLPGDDFYVPEPHLVHEIISFPGSEEEFRARSKHLHRYTYGPGVRNLELNIAPPNGHLKPLKFQAERQKL

SEQ ID NO: 42388 - DNA, 7769 bp, DROSOPHILA
cagccaaaaatgcactccagagaagttctgtttgagccagaaaccctgctcccaggaagatttcgattcgctagatatggataacaaacttgaggctttgcagtcgattgtcaacgtaagatattctcaataattagaatgcaattagagtaacgtaacatttttgtacagcaattcaccggcgacaaccatttgctactgctcgtcttcaccaccttgaagtgcgcgcatttgtcgcaatcctcgaaagctgcgttggatctggccgtctccttgtaccaggccacctttgactatgccatcaagacaaagcaggagacacgtgtactcaactatgtactgatgcagctccgtttgttgccctgcaaggaggtattccattcggactacgatgtcaagaactgtcgatttgctcttcgcgaggctctcaagcaaccaacgtttgccaacgacaacattaagaattcctttaagactttcctggagggtgcggagtcgtaaagagaattagagaagagattacctttatttcccactttccgatttgtgtagctttcgcgaataaaaacgtattattcctaacccgtagtggtgttttttttttacccaaaaaaccaatcgaaatttaatgtattagccattcggcaaaagtgatttatttacatgaagaaaactcgtatgagactacaaactatctttatggaacatgttaatacatcgatattacgtttgtaaattcctcttggtggctttcttgctgctctggaacagaatcagctacagtgaacgaatgtagcgaagtgtttatctatagttaataaaaacacgaattataaaacattgacgttaacatcgaggagaacattgaaagattataaaataacgaacgatcgtggcgagcaagtccgcaaaaaaaagtgcctcctcgagattctcgatgcggataatgctgattctaagagtccatcttctatcaatatcctgtgtggaaatgtgttccttaacaattaaaatcagaatcatcatcatcatcttcatcaatctcgatatcatcatcatcgctttcaattacagctcgcctcttcttgggcggagctttctttttggctcctccactgctctcatcctctcgtccacgcttagctggacgcttgggcgaatcatcatcgctggcattgccatcatcatcagagccaacgttgccaccgtcttcctcctcatccgagaagagcgagctgtagtctatcttcttactggcctgtcgacgtccaggacgctctgcacgaggagttacttcctccacgtcatcgtcgctctttttcgcctaaagatgaaaaatattaattgacaattaaatacagatttgggtttaaaaacaaatatgggcaattactgaaacacttaccttggccttgctgaagtcaatcttgctctgcttgagcccgccgccgttctccttcttttggcgcggctttttttctcccggctccttcttgacaaccgccttcttggccttgggtgaggtcttagagccgccctcgaccattgcatcaaattcgtccacctcatcgccgctggcatcaggttcggctttaatctgcttgcccttcggttccttcttcacttttggctccttgggctctttgggtttcttcggctccttagccgcctgagctaccttggcagccgctgccattttcttaatgatttcttcggtgatcttaaactcgacgggttctccatcgggatctgggaatacgtctccggcacccgctccgcctcccattgacttaacctttctgcccttagctgaggccgacttctggcccttcaaagccttcgcggtcttgagattgatcccctgctcttctgcgcgctccttctcctctacttcatttaacttcgattcgagggcatccaaatcatccagccaaagcatctccggcgtcttcttgcgcagactttccaactcggacagtttagtgtcgcgctgtttgagtagctcgtttttcttctcctctgtcaacatccacatggacatacccagaaggtagtcaaactttttgacatcagttagtttcttaaaggccttttccggatcgacttccttttccttcttagcctttgagctgacactgggagctgcctcctcttcttcttcgtcctcttcgtcagcttgctcggcatcctccattttaatgcggcgctgccactccttgacgggatcgggacgatatccacgcttcaacaactcatcacacatggccttgcgctgcttgttctccaccaccagcttcttctcacacttttcgagaataaagcgcgcctgatcactgaggcgatcagcctgcgccgtgagctggccgaccaaaaagtccctccggcgggcgtagtactctcgtcgcagtttgtaatactctttaaggatatcgatcgcggtggggaagcgtcgcagacagttgttctggtcgaacgcatgcatctggttggtggacagcgtcgtggtaagtttgaacactcggtagaaaccaccttcttctgcatgaatgcgctcaaattctccaggtgcgaaactgatcacaaagcgaacggtggtgtctgtatgatactccctgtactcggaaataatacccttaaccttttcggtgccgtttgataaaggctccaggacattttccttgtagttttgcgtccatacgcccacagggagttcactgatttctaaacggtttccggacaaaatttgaatgttaccagtctgaatataacgaccatccgaaacatactccatgcgtcctaaaaagttcttgtaccacggatgcatcacacttggctcttgtccgtttatcatcttccttagatttttcataatctcacgaggattgtagttggatatcttcgtggaccatccagttcctatgccctcggctccgtttaccaataccatcggtatgatgggcagataccatagtggctcgatcttttggccatcgtccacctggtaatccaaaagtggatcgtccaaaggatggtagatgagtcgcgtcaagggagacattatagtgaaaatgtaacgagcgctggcgcaatctttgcctcccgacaagcgggtaccaaattgaccgcgtggctcaagcagattaatgttgttggcacccacaaaattctgagccagattcacgattgtcatctgtagggatacctctccgtggtgataggctgacatctccgccactgatccggatagctgggccaccttcacctcacgcttgtcattcctcttgaagcaagtgaacatcaccttccgctgacccggcttcaagccatccaccagactaggaatggagcgctcattgtcagcattcgagaacagcaccaactccagattgataaagtctgcataggtgatgctcttggtgcccttggtgtagagatatcgctctggcaaaccgagctccttgcgacgcttcacctcgtccatgtggttggtaagccatacctttcgcgactcgatgtgcttcttggagaaggccataacaatgctctcatcatccaccgatccatcgtacttaaataagatgcgatggcgatccatgtcttgaaaatactctttcgcctccttggaggtcgaagtacccaaacccttatagtactttatattgtacgtatggtgattagctgtatcatttttccactcctcgaattcgggtagcgagtagaatgacagctcctcgtttttcttggttgccttcacaattggtgtaatgaactcctcgaggaagggcagacgcagaagctctggccaattggtgtggataaagttgatcaagagacccttgatgtgggagccatcctgatcctgatctgtcatgatcatcactttgccatagcgcagagtttttagatcgtcctcagtgaggtacttctttttgtattgcaagccaattatcttgcataaattgttgatttcggcattctccgaaagctgcttgaaattagcttcccgcacatttagaagtttacccctaagcgggaacacgccgtagagatctcgtccgatcacgcccaaaccggatacggccaatgacttggctgagtctccctcggtgaggatgagggtgcatttaatcgagttctttccacccgcctcgttagcgtcctccagcttgggaatgcccttgatcttgcttgacttgcgaccgcccgtcttggcaatgtcattttgggccttgaacttggcccatgccagcacagactccacgatgccagacttggacatgttgttgatgaacttttccgagagggtacacttggaaccgaagcccttttgttgcagagtcatgttctccttggtctgcgagtcgaaagtggggttctctatcaagcagttgacaaaaacccacagatggtttcggacctggaatggcttgatgttgatgccacctggaagaggttcaaagcaaatattagttgttgtttaagaaaatacacattttaagttaaacgtacctttgttctttttcttcagaacctcgagcagctgcttaatgagattgtctaccacatggtccacatgccgaccgcccttgtaggtagctatcgagttgacaaacgagacctgttggaagcctcgatctgaaggacagcaagccacctcccaacgctcgttggcaacctcgtggactatcttgatcggtgggccagaatcgtcgtccgtgttcttgatgtgcaaatcaatatagtccttgaagttgcgtacacccagtttgttgccgtttaagaagacggatactcccttggatgaggcggccacatcgtaggcgcgacgcgacattagagccacaatatcttcatcgagacggtccatcttgaacttggccagatcgggactgaatgtgatgcgtgtgtagtcagtgccattgaagtccttgatctgtgggtttactgaacattagatgatggtctaaaataagaaatgttatttccttacctgcacatcggaggcttttcccatgttgtttccccaagtctgcttgaaacttttcttgtattccctcgtggcagtctcaacggtgaagctggtggagaatatgttgcagagcttcgctccgtatccgttcctgccgccagtgaccttcttctcatcgtcgttgtagttcgacgaggtcagcagatgaccaaagatcatcgttggaacgtacatcttctgctccttgtgcatggtcaccggaatgccctggccgttgttccacacggacaccatattgcgctccggatcgatgtcgatcttaatggtgttcatgctcttgtctcgctgcttgttatctgccgcattcacaagaatctcgtcgaatatcttgtagaggccgggcacgaaagagatctccttctgcaccatgcggttttgggagttgtcatacacccacatcagctccttggtgaactccacggatccgatgtacgagtcgggtcgcagcaggatgtgctccagctgcgacttcttctggtacatctgttcgatggacagggccttgtttccgttctccatgatgcttctgtcgctgtgctttagctgaatcttcaaagagtaagcaaaaggcatttgttaatgtaatattaatattaataactaatattccgagccattgccttagctactattaatcactcgtcctgcgttctactaagtaaaaaaaaaaccaaagctactagcagaagactacagtacccacccagttaacagttgctattagtatattagtaatattatgttcacgttttttttttaattgttataataccaaataagatagatggcacccaatatgtttaatggcctcttaataacggggatggttgtgcgttggcatgtgatgccaatgctgctgatgctgctgttcaacaattttttattaatgaatgcgcactgtacccacggtgaaaaaaaaaaacaaaacgcgcgcccgcgcattgcgtaaatgccgtccagacaaacgctgcaatggaatgggacttggccaacatgggaaatggttgggtacgtcaaacagaaataactgcagataaattgaaaaacgtcaaactaagtattattttgcctggtgctactgtactgggaacagattttcagcacactttgaaatacataacagccctgtctctttggcggcaacgcttggcgtgcgccgtctgttgcgtgagtgtgcgtgtttattggcgtttgccggtagtcaccgctatttattatttcttattaaggttcttcgaggggtttcactttatagtaaacaaattcaggcctacatacgcgctccgcgctacaaaatcaaaaaactatggtttttaaaggcccaaaattagctaaatgtctataccggtatcgccatttttaatttgcaagcgacgccaccgaaaaattgctatatccatcatattaaaggattaattagacagggctcttaggttctacggtacagccaattctacgattatgattcagcactttctgcttacctggttaaaaaattgccaagtatttgtggccttttcttgctgccgccgacaaccgaagtgcggcaaaactctatgttgcaggcgatacacgaggcggtgcactacaattttcgacttgtacgtgccccacgcgtctgctgcctttagctaaaacttgtacagttctcaactaactattaaaatacgcacagcacatttaacaacttttcacaaccgacaacaaatgagaagtattgctggttttagagctggcaaggcgcacaaatcgatgtttgaatgaaatcgctatcgataagtcccataacagtgttgtttgggttggtgcatacgctcattgtgaacagggctaaactagtaactgcggtcggtgactccgctaaaagcgtgatcgccaaaatcacggttttttagttctatctcaatcacgtgatgagttaagcaacagttaattctaaaaaattcgaaggtaataaataataataacatttttggggttaaattctttttcgagtcgaaagtaggggttttaattattccaactaacatttcttctattttttacattataaatcggcattgaaataaatgtaaaaaagataaaatatttcgatctaaatgcaaattatcaaaaatttaagacaaagtaaaaccattaagaaatttatcctttcatatgcttagtattgtatcccacatcaatgtgatatacagcaattacttaaaatgaaatgaaatgaaaaattgctgctaaagttgcatttgtgcaattaaatttcgcaccgttgaagtgaagattgcttttcaattaaccacctggtaatatgaatattccaaagccaagaccatggctacaagagaactggttttctttctgccattttgcctgaccttgcccaacacgacgtcataaaggggcatgtccctccccatcccgttgcgattttcattccggctcagaaacatgttttgaatagtgcaaacaaaatataaagattctggattcatccgagttactcggaatttctgcttgggtaatggagaacccttcacgcagtgacgtcaccggagctcattgaacttgcacagcatcgaatatcgtccagaaatattctctactcctccaaatctgttgattctcgtttgacaagcatcagcaaagatctctcaatatgcggagtgcagtttgtaccctgccaaattgggaatttcagctgatgcatgggaaaattgtgaactagcggagttaagtgcagttt

SEQ ID NO: 42389 - DNA, 4528 bp, DROSOPHILA
cttgccagctctaaaaccagcaatacttctcatttgttgtcggttgtgaaaagttgttaaatgtgctgtgcgtattttaatagttagttgagaactgtacaagttttagctaaaggcagcagacgcgtggggcacgtacaagtcgaaaattgtagtgcaccgcctcgtgtatcgcctgcaacatagagttttgccgcacttcggttgtcggcggcagcaagaaaaggccacaaatacttggcaattttttaaccagatggagaacggaaacaaggccctgtccatcgaacagatgtaccagaagaagtcgcagctggagcacatcctgctgcgacccgactcgtacatcggatccgtggagttcaccaaggagctgatgtgggtgtatgacaactcccaaaaccgcatggtgcagaaggagatctctttcgtgcccggcctctacaagatattcgacgagattcttgtgaatgcggcagataacaagcagcgagacaagagcatgaacaccattaagatcgacatcgatccggagcgcaatatggtgtccgtgtggaacaacggccagggcattccggtgaccatgcacaaggagcagaagatgtacgttccaacgatgatctttggtcatctgctgacctcgtcgaactacaacgacgatgagaagaaggtcactggcggcaggaacggatacggagcgaagctctgcaacatattctccaccagcttcaccgttgagactgccacgagggaatacaagaaaagtttcaagcagacttggggaaacaacatgggaaaagcctccgatgtgcagatcaaggacttcaatggcactgactacacacgcatcacattcagtcccgatctggccaagttcaagatggaccgtctcgatgaagatattgtggctctaatgtcgcgtcgcgcctacgatgtggccgcctcatccaagggagtatccgtcttcttaaacggcaacaaactgggtatagtccacgaggttgccaacgagcgttgggaggtggcttgctgtccttcagatcgaggcttccaacaggtctcgtttgtcaactcgatagctacctacaagggcggtcggcatgtggaccatgtggtagacaatctcattaagcagctgctcgaggttctgaagaaaaagaacaaaggtggcatcaacatcaagccattccaggtccgaaaccatctgtgggtttttgtcaactgcttgatagagaaccccactttcgactcgcagaccaaggagaacatgactctgcaacaaaagggcttcggttccaagtgtaccctctcggaaaagttcatcaacaacatgtccaagtctggcatcgtggagtctgtgctggcatgggccaagttcaaggcccaaaatgacattgccaagacgggcggtcgcaagtcaagcaagatcaagggcattcccaagctggaggacgctaacgaggcgggtggaaagaactcgattaaatgcaccctcatcctcaccgagggagactcagccaagtcattggccgtatccggtttgggcgtgatcggacgagatctctacggcgtgttcccgcttaggggtaaacttctaaatgtgcgggaagctaatttcaagcagctttcggagaatgccgaaatcaacaatttatgcaagataattggcttgcaatacaaaaagaagtacctcactgaggacgatctaaaaactctgcgctatggcaaagtgatgatcatgacagatcaggatcaggatggctcccacatcaagggtctcttgatcaactttatccacaccaattggccagagcttctgcgtctgcccttcctcgaggagttcattacaccaattgtgaaggcaaccaagaaaaacgaggagctgtcattctactcgctacccgaattcgaggagtggaaaaatgatacagctaatcaccatacgtacaatataaagtactataagggtttgggtacttcgacctccaaggaggcgaaagagtattttcaagacatggatcgccatcgcatcttatttaagtacgatggatcggtggatgatgagagcattgttatggccttctccaagaagcacatcgagtcgcgaaaggtatggcttaccaaccacatggacgaggtgaagcgtcgcaaggagctcggtttgccagagcgatatctctacaccaagggcaccaagagcatcacctatgcagactttatcaatctggagttggtgctgttctcgaatgctgacaatgagcgctccattcctagtctggtggatggcttgaagccgggtcagcggaaggtgatgttcacttgcttcaagaggaatgacaagcgtgaggtgaaggtggcccagctatccggatcagtggcggagatgtcagcctatcaccacggagaggtatccctacagatgacaatcgtgaatctggctcagaattttgtgggtgccaacaacattaatctgcttgagccacgcggtcaatttggtacccgcttgtcgggaggcaaagattgcgccagcgctcgttacattttcactataatgtctcccttgacgcgactcatctaccatcctttggacgatccacttttggattaccaggtggacgatggccaaaagatcgagccactatggtatctgcccatcataccgatggtattggtaaacggagccgagggcataggaactggatggtccacgaagatatccaactacaatcctcgtgagattatgaaaaatctaaggaagatgataaacggacaagagccaagtgtgatgcatccgtggtacaagaactttttaggacgcatggagtatgtttcggatggtcgttatattcagactggtaacattcaaattttgtccggaaaccgtttagaaatcagtgaactccctgtgggcgtatggacgcaaaactacaaggaaaatgtcctggagcctttatcaaacggcaccgaaaaggttaagggtattatttccgagtacagggagtatcatacagacaccaccgttcgctttgtgatcagtttcgcacctggagaatttgagcgcattcatgcagaagaaggtggtttctaccgagtgttcaaacttaccacgacgctgtccaccaaccagatgcatgcgttcgaccagaacaactgtctgcgacgcttccccaccgcgatcgatatccttaaagagtattacaaactgcgacgagagtactacgcccgccggagggactttttggtcggccagctcacggcgcaggctgatcgcctcagtgatcaggcgcgctttattctcgaaaagtgtgagaagaagctggtggtggagaacaagcagcgcaaggccatgtgtgatgagttgttgaagcgtggatatcgtcccgatcccgtcaaggagtggcagcgccgcattaaaatggaggatgccgagcaagctgacgaagaggacgaagaagaagaggaggcagctcccagtgtcagctcaaaggctaagaaggaaaaggaagtcgatccggaaaaggcctttaagaaactaactgatgtcaaaaagtttgactaccttctgggtatgtccatgtggatgttgacagaggagaagaaaaacgagctactcaaacagcgcgacactaaactgtccgagttggaaagtctgcgcaagaagacgccggagatgctttggctggatgatttggatgccctcgaatcgaagttaaatgaagtagaggagaaggagcgcgcagaagagcaggggatcaatctcaagaccgcgaaggctttgaagggccagaagtcggcctcagctaagggcagaaaggttaagtcaatgggaggcggagcgggtgccggagacgtattcccagatcccgatggagaacccgtcgagtttaagatcaccgaagaaatcattaagaaaatggcagcggctgccaaggtagctcaggcggctaaggagccgaagaaacccaaagagcccaaggagccaaaagtgaagaaggaaccgaagggcaagcagattaaagccgaacctgatgccagcggcgatgaggtggacgaatttgatgcaatggtcgagggcggctctaagacctcacccaaggccaagaaggcggttgtcaagaaggagccgggagaaaaaaagccgcgccaaaagaaggagaacggcggcgggctcaagcagagcaagattgacttcagcaaggccaaggcgaaaaagagcgacgatgacgtggaggaagtaactcctcgtgcagagcgtcctggacgtcgacaggccagtaagaagatagactacagctcgctcttctcggatgaggaggaagacggtggcaacgttggctctgatgatgatggcaatgccagcgatgatgattcgcccaagcgtccagctaagcgtggacgagaggatgagagcagtggaggagccaaaaagaaagctccgcccaagaagaggcgagctgtaattgaaagcgatgatgatgatatcgagattgatgaagatgatgatgatgattctgattttaattgttaa

SEQ ID NO: 42390 - protein, 1423 aa, DROSOPHILA
MENGNKALSIEQMYQKKSQLEHILLRPDSYIGSVEFTKELMWVYDNSQNRMVQKEISFVPGLYKIFDEILVNAADNKQRDKSMNTIKIDIDPERNMVSVWNNGQGIPVTMHKEQKMYVPTMIFGHLLTSSNYNDDEKKVTGGRNGYGAKLCNIFSTSFTVETATREYKKSFKQTWGNNMGKASDVQIKDFNGTDYTRITFSPDLAKFKMDRLDEDIVALMSRRAYDVAASSKGVSVFLNGNKLGIVHEVANERWEVACCPSDRGFQQVSFVNSIATYKGGRHVDHVVDNLIKQLLEVLKKKNKGGINIKPFQVRNHLWVFVNCLIENPTFDSQTKENMTLQQKGFGSKCTLSEKFINNMSKSGIVESVLAWAKFKAQNDIAKTGGRKSSKIKGIPKLEDANEAGGKNSIKCTLILTEGDSAKSLAVSGLGVIGRDLYGVFPLRGKLLNVREANFKQLSENAEINNLCKIIGLQYKKKYLTEDDLKTLRYGKVMIMTDQDQDGSHIKGLLINFIHTNWPELLRLPFLEEFITPIVKATKKNEELSFYSLPEFEEWKNDTANHHTYNIKYYKGLGTSTSKEAKEYFQDMDRHRILFKYDGSVDDESIVMAFSKKHIESRKVWLTNHMDEVKRRKELGLPERYLYTKGTKSITYADFINLELVLFSNADNERSIPSLVDGLKPGQRKVMFTCFKRNDKREVKVAQLSGSVAEMSAYHHGEVSLQMTIVNLAQNFVGANNINLLEPRGQFGTRLSGGKDCASARYIFTIMSPLTRLIYHPLDDPLLDYQVDDGQKIEPLWYLPIIPMVLVNGAEGIGTGWSTKISNYNPREIMKNLRKMINGQEPSVMHPWYKNFLGRMEYVSDGRYIQTGNIQILSGNRLEISELPVGVWTQNYKENVLEPLSNGTEKVKGIISEYREYHTDTTVRFVISFAPGEFERIHAEEGGFYRVFKLTTTLSTNQMHAFDQNNCLRRFPTAIDILKEYYKLRREYYARRRDFLVGQLTAQADRLSDQARFILEKCEKKLVVENKQRKAMCDELLKRGYRPDPVKEWQRRIKMEDAEQADEEDEEEEEAAPSVSSKAKKEKEVDPEKAFKKLTDVKKFDYLLGMSMWMLTEEKKNELLKQRDTKLSELESLRKKTPEMLWLDDLDALESKLNEVEEKERAEEQGINLKTAKALKGQKSASAKGRKVKSMGGGAGAGDVFPDPDGEPVEFKITEEIIKKMAAAAKVAQAAKEPKKPKEPKEPKVKKEPKGKQIKAEPDASGDEVDEFDAMVEGGSKTSPKAKKAVVKKEPGEKKPRQKKENGGGLKQSKIDFSKAKAKKSDDDVEEVTPRAERPGRRQASKKIDYSSLFSDEEEDGGNVGSDDDGNASDDDSPKRPAKRGREDESSGGAKKKAPPKKRRAVIESDDDDIEIDEDDDDDSDFNC

SEQ ID NO: 42391 - DNA, 2925 bp, DROSOPHILA
catatatcagcttacctcgatgttccggatgatcacagagtttccattggtgtacaggaagttcttgcccttgggatcggcacccaaaacgatgggttggccgcgttgggtgcgcggcagagttgcgtagatgttttctgcaattaagcgattatttcgattagaaatgggctgtgactgctgctactcagataacgccggcaaattggagtgggtggaaaatagggtgcggcttcgtttttggggagcgaacgggaacggggtcgctccaacggctccacacgcgcctcctcttactgcttaaaaaggtctttcatatgcatctatgcccatttatgggcataatcacggtgcttccggcgattgctttctgcttttaccgtttttcgcctgttgactcatccccctctctacgtatcacattcggagtgggatcggattcatgactccagtttatctctgtgggattccaactcactgttttcgtacgccggtggttggggttgtgccattctggtgatttctcggtgctcctgaagcctttactaattagtgcgaaattccgcggataaatgaaaacaccaaactcaagttcgccgacgattagtggtgggctaagatcgatgttttcaccatcgtcgtcatcgatggttttttctttgctttatatcgactttgcgctgcgtttacccctttttaacagcgaagtgaactggaaggaaattaaaaatatattgttctgtgttttatactaacagtaactactaattgctaccgtttttaattatacactaaaaaattgtttttttttttgggattgagttttcaatttcctatatttgaaaaggaaatatataatcaaaattgtatttttatctaatttaataaaatgtatatttttcaaaaactatctaaatatcgataaattgcgccaaataaattaatcggtctctgtggttccccacctctaccattgtttatatttttcattttccgcaagaatgatgcaaagatttccgacgcaggcgaccgtggagaatccacgttatggacagctaatcataggacctcctggttctgggaaaaccacctattgcggtgaggcccttaagttctatcgcgaactgggccgtcaggtgggcgttgtgaatctggatccagccaacgaaaacatgtcctacgaaccggtgctaagtgtgatggagctaatcactgtggaggattgcatggagcacctgaagctgggaccaaacggagctctaatgcactgcgctgagtatctggccgaccatttggaggattggctgttgccggcactgcgcaaactaagcgccacttacaactacttcctgttcgactgtcccggccaagttgagctatatacccatcacaacgctatggcccggattttcgagcgtttggagcgtgaaagatatagcctggtcaccgttaaccttatagattcccattactgctcggagcctgccaaattcattgccactttgctgatggcattgaacaccatgttgcggatgagtctaccccacgttaatgtgctttccaaggccgatctgctaaagaagcacgagaccaagttacactttaacgtggactattatacggacgtcctggacctcaagtatctgctggacaaactggacgatgatcccgccatgcgcaagtatcgaaaactgaatgcagccatctgctccatggtggaggactacgctctcgtttcgttccaactgctggacgtcttcagcacggacagcatgctccgcttgcgcaatcacatcgacaaggctaatggatacgtctacaaggcaggtgaggagcagacggtcaactcactactagcctgcgccgtgggtgcagaaactgaggccgctcgcatggagcatgatgtccaaccctatatggaataaaagaactgaaactaatcgaaaatagcctgtgatattgtgcattgtatttcgaaaataagttatacaagtcgagagtgagggattaaggtacggaatgaaaagcagtgattttttggatttattaaaatattatctcggcttgaactcttaaacttttttagttgtttttctaaccacatatttttaagaggaaataaacctttaaagttgtttaaatacattgcaataagaatggttgataatcacttgaggatcacctaatcggaaaacaccaagagaactctacatttgaacttggaaaatccagaccaccactagatgtcgctgcaaacgttaaaacgtatgatgtatgtaaaattttacagatgtacagaattgtacgggtttgaattcagaattattaaattaaatttaataaaaaaaaatacaacaaaaatcatttcgttttgttttgtttttgggctttgttgactttttcagaaaatatgtcaaatggagaaaattgtatttatataaattatgattttaagaatatcctttgctaggcgaataaaaattgacaattgaactgatctaaaatatcaataaagaaacttatactaaataataacttattacataagaacaggtatgaatttcgaagtctggtagatctcatcaaaaagacccacgtttctcggtaaattagttaggcttcaatcaaacaaaagcgtcctttttagcatacaaaaaccaaaagttcaacttgagtcgaaaaggatctgcatctgaaccctatactttgatttaactaaaagcaaagtcctcgttaacataaataaaaattaattaagtccgaggcgcgttgttttgcgagataagagctggaacgaccggtgaacatctcgtggcaagctgcaaattgtggcacgtgcaccacaaaacgggattgccattgactcctataccacgaccaagtcgtgagcactcgggggctccgtcttgcagacacgggaagacg

SEQ ID NO: 42392 - DNA, 925 bp, DROSOPHILA
aatgatgcaaagatttccgacgcaggcgaccgtggagaatccacgttatggacagctaatcataggacctcctggttctgggaaaaccacctattgcggtgaggcccttaagttctatcgcgaactgggccgtcaggtgggcgttgtgaatctggatccagccaacgaaaacatgtcctacgaaccggtgctaagtgtgatggagctaatcactgtggaggattgcatggagcacctgaagctgggaccaaacggagctctaatgcactgcgctgagtatctggccgaccatttggaggattggctgttgccggcactgcgcaaactaagcgccacttacaactacttcctgttcgactgtcccggccaagttgagctatatacccatcacaacgctatggcccggattttcgagcgtttggagcgtgaaagatatagcctggtcaccgttaaccttatagattcccattactgctcggagcctgccaaattcattgccactttgctgatggcattgaacaccatgttgcggatgagtctaccccacgttaatgtgctttccaaggccgatctgctaaagaagcacgagaccaagttacactttaacgtggactattatacggacgtcctggacctcaagtatctgctggacaaactggacgatgatcccgccatgcgcaagtatcgaaaactgaatgcagccatctgctccatggtggaggactacgctctcgtttcgttccaactgctggacgtcttcagcacggacagcatgctccgcttgcgcaatcacatcgacaaggctaatggatacgtctacaaggcaggtgaggagcagacggtcaactcactactagcctgcgccgtgggtgcagaaactgaggccgctcgcatggagcatgatgtccaaccctatatggaataa

SEQ ID NO: 42393 - protein, 306 aa, DROSOPHILA
MQRFPTQATVENPRYGQLIIGPPGSGKTTYCGEALKFYRELGRQVGVVNLDPANENMSYEPVLSVMELITVEDCMEHLKLGPNGALMHCAEYLADHLEDWLLPALRKLSATYNYFLFDCPGQVELYTHHNAMARIFERLERERYSLVTVNLIDSHYCSEPAKFIATLLMALNTMLRMSLPHVNVLSKADLLKKHETKLHFNVDYYTDVLDLKYLLDKLDDDPAMRKYRKLNAAICSMVEDYALVSFQLLDVFSTDSMLRLRNHIDKANGYVYKAGEEQTVNSLLACAVGAETEAARMEHDVQPYME

SEQ ID NO: 42394 - DNA, 3808 bp, DROSOPHILA
ccactttcaaataaacaaataacgactccagcgcgactgtgtgtgcgtgagtccctcccaatgtttgtgtgtgttatcaaaaaaggcgtagaaaagtgcaaaaacaaaggtgttattgactctcaactttctttttctgcctatcgtgtgtatcactgtgggctgtggccgaataagagcgttcgccgaatatgagcaattggaaaagcatgagcataagtaatgaggcagaatcggttgcattcaattagttggagaaatgaaaaatatgaagagatggtgtagagagaagggaagagtgcagtctcgagcaatcaataccaacgcagccacgagcccccctttctttgtgtgtgtgtgtgttaccgtgtgaaaacaaaacaaatgtatgctagctgtggaaaagaaagcgcataattgaataataaataataacagaaacagggcaaatggcaacgactcaatgacaaaagtaaagccgccaccgcagcagaagaaatgtgggtgcaaaagtgaagaaatatgccattgtttatgtgatttgcaaatgtgcacattcacacaaacaccgtggcaagataacggttgttgtgcgggcgggtgcattgctcgaagtggctgtgcaattgtaagagcgagatagcaatacgaagagaacaggactgagcagtacaggggcgaaatccaggggaccttaaacgtggattatgggcaccttaaatgtttttgtaaaatcaaatcacataaataccgtactttaaactattcagtgaattaaaattgtgttactgattttaaaaatgtaagttgtaatttcaagtttggaaatgaacggtatgccctgcacgtttgtctagatccacccctggatagagcgcagcaaagagaacagtgcaaatcgaattagtccagacttttggtcacgcccttgaacttcgcattaacccaccaacgccccccttccgcagctagcacctaaggaccccacacaccacataagatgttcaactttatgaagaagagcgctggggatgaggacaaggagcgtcgcaagcgcgaaaaaaaactgcgcaaagaggctaagggcacctctggtggcccgggaatgggaggcgtgactggcgtcaccggcagcatgagcaccgacgagctgctccgcctggacgaggtgcgccgatcgcttaaaatccgagggcgacgcaaggagaaggaaaagttgccgagcggaattacggcggactatagcgcagacttctttgccgccctcaatgcagatgcaaacggcggaagcaacggaggagcagtgggagctgcagatcccgagcaggatcgtggcaatgaggagattgtagcatctgtgatgacgcacatcgagagccgagcgtccaatggcgccggcgtgagtgtcaactacagcgaggtcacacattctctcctctctggagggctcaaggtgaggtctttgtcgttttcttatccgaaatcgtattgaaaaactttgcttccacattccagaatcgctttcttccacctatacccccaaaaccacccaagcgtggcattctgaaaggctcccgcagtaatatgaccaatgtccacgaggagattagctttgcgggtagtgccggaggagcaggtggcacgccagagatgctattgcgcaacacctttcagaatgaatccctttacgagggagctgccaggggagctggttcgatcggctcgaactccagtcagcatggaacctcgttcacttccgtggagagcctgcgcagcgatggagagcagacaggaggtcaacaacgggccatgaccctgccggccaacgcccgctatggagctttaccccagggcaacagtcaaggatcgcacctccatgtgctcacctcgccgtcgcccagcgccgacagtctcacagataccacaaactcctctttcgccacacccccattttcgctgagtcccgtcggcgagtcccaaggcatcgaccgttgggcccgcgtccatgccttcgaggatgtggagctgccgctgccgccagtgcagctagtaaaacttcccccaccaaggcagctagtgatcaggcgacagaagtctccgcgccaggacttcggctttagcctgcgcaaggccatctgtttggacagaacagagtccctgacttcgcccattttcaggccggttatattcgccgagccaggtgctggtggcggagccacaggtcttttgcctggcgatcgcctaatcaaggtcaacggcacgccggttggggaactgccgcgggagatcataattgagatgatacggaacagcggagaggctgtcaccgtggaggtatgttgttctaagaatttcctaattccttttatgtgcatacgctaaaataagaattaaagtatgataagaaaagatatgataagaacacctttcattttatggctcacaggtaaatacctgacaactttgttaaagttttgcatgaattgttaatatgtgattatgttttgtttcatcataagcaatccctctacgtcggagttttgtataaaatgcgttatttggttattataggaatatttagctggtaaacttttactttgtaaaattctaatattcttgaatcccttgccacccacccaggtccaaccagtcgctgagttggtggagctgagcaagcgatgcatggcccccagcacagccaccgtggaggagatcgatcattccattaccaacggcaactgcaataccctgcgacgcagtgccagcaagcgcttcaagcgtcaggtgagtcgagatcgcatccattagtgggtctagcttacacacgtgattgatggaccaggcaggccgtcatcacagtactgcaacgaaccaaacctcgaagctttggttgcataacaacattaaacattagaatgcatctgatcaattatgaaaagctcagaggcatcttgggaattaataacgatcttttaaatgatgttctaagctgaaattgtactttttaaattagaaaatcggtttcaccgcatacttttggaatcatattgatgattcttctggtattctcgtcaggcgtttcctgtttgggtttacttttcttttgcaaatattctgccatttgattccaagcttttctcatatgactcactcaatgccagttctgttcggtatgtgtatagttagttgtctagttatttataaattttatgtgtgacagatgccttagggaaaatataataccaaaataatagttattatttcacagactcatctgtatgtactttcctacgaatatttgccactgttgcaaatatttttgtcctactgataaggggatatctatttgaaaatcgttaggagagcatttcgtaaccgcatatttccttgcccagctggtagatcgcaattcctattgactcgttgactatgctagaaacgtgtttgacattttctcaccgtgtttaactggcacaaatattgtgaaatgtggtcgtaagcctggggctctgggactagccagcgatctattcacctatgtgtgtatctatttgtccacctatccagtatggcctggccctttctataaatatgcacgtgttgttggtggagcaacttgggtggggtggtgctaaggcgttgacatatttcaccgcctttttcgcttccattgaagaagacgaaaataaaaccgcaccgatttggcaacactgtggaaaactcgaactgcatttggtatggacattatgcatttttgcattcggccaagcaatgcaacagcagcccacttcgaagagtccaagagacg

SEQ ID NO: 42395 - DNA, 1440 bp, DROSOPHILA
atgttcaactttatgaagaagagcgctggggatgaggacaaggagcgtcgcaagcgcgaaaaaaaactgcgcaaagaggctaagggcacctctggtggcccgggaatgggaggcgtgactggcgtcaccggcagcatgagcaccgacgagctgctccgcctggacgaggtgcgccgatcgcttaaaatccgagggcgacgcaaggagaaggaaaagttgccgagcggaattacggcggactatagcgcagacttctttgccgccctcaatgcagatgcaaacggcggaagcaacggaggagcagtgggagctgcagatcccgagcaggatcgtggcaatgaggagattgtagcatctgtgatgacgcacatcgagagccgagcgtccaatggcgccggcgtgagtgtcaactacagcgaggtcacacattctctcctctctggagggctcaagaatcgctttcttccacctatacccccaaaaccacccaagcgtggcattctgaaaggctcccgcagtaatatgaccaatgtccacgaggagattagctttgcgggtagtgccggaggagcaggtggcacgccagagatgctattgcgcaacacctttcagaatgaatccctttacgagggagctgccaggggagctggttcgatcggctcgaactccagtcagcatggaacctcgttcacttccgtggagagcctgcgcagcgatggagagcagacaggaggtcaacaacgggccatgaccctgccggccaacgcccgctatggagctttaccccagggcaacagtcaaggatcgcacctccatgtgctcacctcgccgtcgcccagcgccgacagtctcacagataccacaaactcctctttcgccacacccccattttcgctgagtcccgtcggcgagtcccaaggcatcgaccgttgggcccgcgtccatgccttcgaggatgtggagctgccgctgccgccagtgcagctagtaaaacttcccccaccaaggcagctagtgatcaggcgacagaagtctccgcgccaggacttcggctttagcctgcgcaaggccatctgtttggacagaacagagtccctgacttcgcccattttcaggccggttatattcgccgagccaggtgctggtggcggagccacaggtcttttgcctggcgatcgcctaatcaaggtcaacggcacgccggttggggaactgccgcgggagatcataattgagatgatacggaacagcggagaggctgtcaccgtggaggtccaaccagtcgctgagttggtggagctgagcaagcgatgcatggcccccagcacagccaccgtggaggagatcgatcattccattaccaacggcaactgcaataccctgcgacgcagtgccagcaagcgcttcaagcgtcaggtgagtcgagatcgcatccattag

SEQ ID NO: 42396 - protein, 479 aa, DROSOPHILA
MFNFMKKSAGDEDKERRKREKKLRKEAKGTSGGPGMGGVTGVTGSMSTDELLRLDEVRRSLKIRGRRKEKEKLPSGITADYSADFFAALNADANGGSNGGAVGAADPEQDRGNEEIVASVMTHIESRASNGAGVSVNYSEVTHSLLSGGLKNRFLPPIPPKPPKRGILKGSRSNMTNVHEEISFAGSAGGAGGTPEMLLRNTFQNESLYEGAARGAGSIGSNSSQHGTSFTSVESLRSDGEQTGGQQRAMTLPANARYGALPQGNSQGSHLHVLTSPSPSADSLTDTTNSSFATPPFSLSPVGESQGIDRWARVHAFEDVELPLPPVQLVKLPPPRQLVIRRQKSPRQDFGFSLRKAICLDRTESLTSPIFRPVIFAEPGAGGGATGLLPGDRLIKVNGTPVGELPREIIIEMIRNSGEAVTVEVQPVAELVELSKRCMAPSTATVEEIDHSITNGNCNTLRRSASKRFKRQVSRDRIH

SEQ ID NO: 42397 - DNA, 10907 bp, DROSOPHILA
aatacatttcttatcatcgcataacattacaattatttaaattcgaaaagagcgcagcgacggggaaaatcaaagcgctaagtgttggttttgttttctttttaccggttgcaggtgtattatgtatgggtgattattacaatctaggctcgcgatcggatcggtttctcgttacttgacagctaacatcatcactaagcggttggttaatgctactaaagttagacttttggtacccatagagataattcaactaacgtttacagttatacagtgttatcgtactcgaatatgtatctgtttcgcggacattacaatacttttatccttgctgtgttccataaaaatgagcgtaacttgcaagcgaacgacaattaaagagtccactactctgccatttttggtaagatttttcttttcatttgttttgttttgtttgtttcttttgttggttggtgcttaaacatctagaaaatttgacttctttgcattatcattaactaacgctgacgatacgaactaaaaatttaagttacaaacacacacagatcagaatatacacatacataggtatataacgacttacatacgtttataggaatctttctatttagctttagttgtaggctatcaaattgctgtgccacaatttgcttatggtatgtgtttttctcaatattctttcctactgctctccgatactgttgctcaaaatggatgttatatacaggatgagagtgggcggtaatgtgttttgcgatttagatgaggtgttcagaactatgtacatattgaagatatgctaatgtgatccagaaatctcgccacaacggacttgtctagaaaaccttttgaagagttatgaccaatacaagttttttttttttgatttcttgcatacttttaggcatcacatatgtggtttaagagttatcatgttaaatatgatcccctttaatctgtttccgagtttctaggaacacaccagattgggatgtatttatttttcaaccgccatagcggtggccccattgctatttgtctccgaatgccgacgcgccagtagatgatgatgatgctggtgatgatgatgatgctgatagctgccgaagggcaacccatgaccattttgtggacctccaatgccattggcgaagggcaggccatcgagatttccaattttgcctacgatttttggtatcctatcactgtccatagccagcagtggtgtggtcaggctgattagcccactaccaccgatgctggcactgccaatcccgattccgtgctgactgtgattgtgatgcgagtgatggtgatgatgatgatggtggttgtggttgtggctgtgactatgattatgatgatggctgtggttgttgatcactggcgtgcttttgcagagagcagcgtgcgttccatttcttgtcttactatccaaatcgagttcttgcgcgccgcgcagggagctggtcttccgaacctgcagcccactgcgcgaatggtcgcaactcttgcaacgctgcttttgggtctgagcctgattggacgtctgccgttgcagcgcattcaaattggctgccaccagcttggcctgaagggttttcaagggcgagactggcgtgctgtcatcctcgccggtgggcggtggcgtggacagacaacttgaggcggtcgaggagctgcaggtactgttagaacggcaggatgcctcatccacttcagcatcgtgaccattctcctcggcggcctgttcgtccacgtcatccgcatctgcatctacatcattatcatcatcactgggctgggtgctggtgggatgagaagcgacggcaattttcttattagtgttgctgctgttgttggcaacgttggagccatttacgcttgctttctcgctcggggagtccactgccacttccgcctccgatgcagccacatcatcatcactcatcgccttgcagtcaccgttcgatatcacattttgctgctgctgctcctcctccggctcctgatcctgactagttttggttttcacgacatcggccagatcaatccaatggccacgattatcgcgcacgccctcgacaagaggctcaagcttgtcggagagggtggcaaaggcctgtcaagtaaacaagaattaataagcttgcttacaaagtatttagccaaaaacaaacctcatagattggcaagcaaatggagtctataaagttcacttgcatcatgggcagctcgtcctccttttcgcgattcatgatatcctacaacagacaattaagatttaatttcaacctaacttttaacaattttgtaaactcacaataggagttatattgagctcctgcttctccatatctccctgctcgaaaaactccgagctaaccaaatcagccacacgcttctcaatctcccacggcttcgtgatggccgacaaatcacagacagtcatgctcattgcacgcaaaagggcgcgcggctcctccgccacccagtagctcgtcggctggctcacactctccaggaaaggacctcgtttcctgtaaaaacaatacagaatttagacactgacccatacaaaatatgttccagctatactcacttgaaataaacggctaagtctgtggacaaaatggcatcttccaataccctaatgacccgacagtagtcatcggatgagagattggccagaatttgatttccaggactattcaggatcattagacactgatcaaagtgatgatgctccatggtggaggttgagtacagctgcgccaaaggcgacgaggctctaaaaacgaatgtttaagtaagaaatttaactttatatttgctttttaaacttacttaatctggaaggagttgttagtcccccgatgatcgagatcatgacataggcagccaataataagcgccaagcattcgatttcgccaaagatcttccaccattgtgtcgtctgcattaggaaataaatatataaaataaatgttataaataaaatataatttgatttcccacttacagttagaatggcaaacatcatttgggccacattgaaggcatgacgccagttgtgataggtaacattgcgatagttcttcttgacactcaaaagccatcggcacagaacttcataatcgatatgaaagcgttctacaaaatcgagatccaaaaacatccgcaggcaggcctaatgaaaacggattagatacttgtttcaaattcagcggatcattatcaagcttacctttagtgtatcatcatcttcaaagtgtatgtcatcgaacttaaagtcatgcagtcgaaagtgtacagctgaaggcactcgaaggcgctaaaaaggtatttttaatttattatttcacgacgcataacatgttgttagagtaagaaaccataagtagatttgattaatgctttcgattcaccaaatgaaactaaattagtgatgactgttttataatctgctacaattaactcttttcttatcacgtattataatccattagcaattattattggattaaatattgcatcgtttaacatgcccaaaaatgtaaatactttacaaacttttgcttggagccagttactttcaacacctcaaaacaaaccagcacgtgcccaaagccaagacacccccaagaaaaagaattaaaagcaaaatctcccactggaccttcatctgtttgctgtcagcaaatgtaaatggtgctatattagccaccaaagctgagaagtttatcaaaatttctgacatttttccgccaaggcaccgaaaagagtgtcagaaggagaaacccaagcagagggcagctgcggaccggaaaaagggttttcccaactaaatggcataagcgcctctccgccttcgtgtgaagcgggaatagagcctagtatggcataattttaattaaaattaataacccagcatctttgtctggctggcaactcgacaggcggtcataattttcccagcataattacagagtgagtccggcgatgaagagcgagctgcgtggagtcggagtcgcacgattcagtagaaaagtttctttttgtcatacttgtgcgaacaaactaattacaactgtcaacacgttgaagctttttacgcgggggcagggacagaggagcttgccttaggccgacagcttgttgctgctgtttctgtttctgtcacacaaaaataataaacgaataaaaaccgtgaagctaacgcagcagacacaatgcacagcaaagcacccgaagtgggcatccggcaggacacattaatttatggctcagcgtaaaaattaagagaccgaactagtggacgacctcttggcctccggcaaattaagtgagtgcaaataaaattaagtatttcactggccttccagctacgacacccgggagggcaatttaatccggaacgaactacgagaatacggcaataaggagcaccggatgggaaccgaaccgaaactcacccgcagtcgatgagcctcgtccatggtggccgatgcgtggtagctgagcacctccagggtgacactctgcttggccattgccacaatggccttctcgtacatgtgcgtgttgtggatgcccatgccgcagaagatggcgaacgcctccacaaagttctcgtcgttcttggtgaagtcctgggggaacagataggagcagtttaaaatatgcagctcgcgattggggcttaatattcttaaattatagttctgtgtctagactctagacaaagataaaagatttaacttgtctaagcattgcagtttgaattttttgacaaagagtaaagaaatttattcagggcttacttaccaactcattgaacttgttgatcagctggatcacaccaatgatctgacccagcgagttcttgatggccatgcatagaatagatcggtgcttgaagcaggagttctcgtccacactcgcatcgaagcgatcgtcctcataggcattgggcacatttaccgtttccccggtggtggccacatgtccagtgataccaatgttgatgggaaaccgcgactcgtaagggctggtgcgtgaagtggcctcctcctcgctcaagtcattcgcctcgaagtcaaagacccgcgagaagctgcccttgtccgcctcgtggaccaggaggatctggacgcgctggcactggatgagactctgcatgtgggtgagaatgcggaagaccatgtgctctatggtgctctgctcctcgaagatcatgcgtgccagatccaggagcacttgattccgcttgatctccagttgagatttctcatacagctgtgcattccgcagcccaatcccacagaattgcagatacgaggaaaagacctgatggggattacagcaaaggattaaacccatggctcaaacaacagaaaatagcagagtagagcttgcaaaatgccataaaaattatgagagcgtcccactggcattacacatcggataatcccttatggcattttgcctgacattctgctaagctttcttaacaagtttcccctttgttgaataatgaatgcaatttgccaccgcagtgggtgcagctcttatgcggctttattcggaacaaaagaaaccatcagactgccccgtcatgcgatctccacatggccccattcgccccatttccgcatttacccctcagccttcagcccacagtccactcaccttttcatcgatttcggagaaacactcgccattcattttgttgatgacctgcgccacgccaatcacatccccggatgaatccttgatgggcatgcaaagcaaggccttcgtccgatagccggtcagcgagtcaatttcacaattgaatcgctcgtcctgggaaacgaaattaatttgcgaacgaattagtatctcatttaaatgggttttcgttgttaacttaagctctgcgtccgtaagcctttacaaacggtttcccttcatttttttcgatttccgttttttagcaagtaccaatgaacaaagaactaaatttacttaatgaaaatctttctcttatattgtgatggttaagtaaaaatacaatacaggcatataaaatgaaaaagaataataataataagcaacaaaagcaaattattcttacatatcagattcaattggttttaattatcaaagtaaaaatattgtcttagcaataaggtcacaacaaattttggctgattgtccaatctaccgtttagataagtttcttattaaataagattctttaaaaaaaaaatccaaatatgtgcctcccttttacaccatctaacactgagaatgctctttatctatcaatcattccattgttggcctttctatttttatcccacttggcacacattccccatgatctattctatctgcctttctttgctccaaaaattgggaggttatcggattccagacgcctccgactgtcgctgccgactggacaattgtttggccagccatttagccgagtcaaaagtccactgggatcgactaaaagatctgcacccgagcgtaactggtgtgcctaaccataatgcgcctcattcgcaccgaaaacctttggtcgcgctgtctggtaccaaaaagtgtcaaatttaggccttgattaattgtgctaacaatcaggagatctgcgggctacaaacgatctgtctgtgcgtcacgtatttgcggtaagtttatctacacccattggcttaatgtgacttgaagaaaacatttcgagcagccgcaattgttatcgttagccgagcgacttaaagtcgaaaaaagaataaaagcattgggagtacatatatctgggtgatataacatgcctaacacggctttgtcttggcgtaagattaattacgctccaattggcagacaggccgaagagaaactgccaaaaaaaaaaaaaatgggaaaatgtggcagtagtggccagggcggaagctgggaaatgtgaaaagtgctggtgatggccaccgagttcactgcgcaatattgaaaacttaaagagcagcaccaccataatacgagtatacacaaacacacacattggattggtatctgccaccataaatcttacaatcgaatgaataatctgcaactctcgcagcagagcttgatttatgacccggttggcattcaaatttgtcaaatttgcctcaagatagtacttgctggatactgacctggtaagcatctggtatgttgacgggctccccgctttcggccacatggccggcgattcccgtgccccatgccacccgcacttcgtcctgctgctccatttcctccacggtgctgcgggggcacacatcgaacagcttcgagacgagacatctgcaggagaaatggaatccaaagttgaaaattataaattgtgttggaggcggcaactatcgtccattgtcatcggacacaatgcaaacttttcctattccactgagaggaaaaataataatagtgttttccaaaatattataagcagcatggcatcagcttgctaaattacccgaaagcaaactaacgaaactacaatttccgtttgttgataatgaaaacaagcgaaaattcccaaacttttaattgggtcataatttattaattcgaatatgcagtcacaatccgagcctgataagtattattgatttacatttgagccatttgtttctcagtgcctcgcctacttttgcagctttcctgctgcttttctttggctttaaaaactttttacccaacagaatgcatttgccaaatgcgcgtgcagacaattgcaattagtgttggcagcaaaatggcgtcatacgatgcatacaaaatggctgacgtgccccattgaccccctcgttgcaggttgctgccgggttatggcatttatggcacggcttttggaacggaaaaggggacgcagcatccgcgcgatgcactcataaaatgccaaaaataaatgccataaaaatgttgccaagacaaagttggagctgagctcctgctctatccacaatgtccacaaaaatgcagctatatgaagtcatcaacaaattgttgaaaatagctaacgcggaggactaaagtaactggctgattgctaagcgccatgaaccagtccacttttgtgctattagaatgcgaatgatttatgatagatggctgtcttcattgcagctctcttcataaactggcgaagcactgggaagtttacaaaatttaagtttaaagatatttggatgatgtggggactaaatatggaattatcctatagttgataaacgttatctggctaactaacacttacttttttaggccatccggtccgttgcatcgtccttgcaccaggaacagagatcctcgatcggcattcagcagaatggacacgttctggagtatcttgtggcacaaagtgcgcacctcgagctcgttgcaaatgtccttcacctggtggcgataaacagcacagtccggttatttacacgactgataagcagttgcatttgaaaaagaaagggagccatggggaaatacagactgtgtgactgacgtctttcgagtgtttgccgataacagcgtcaatgggccgacaaacaaacacgtttgcggaactcaacaaataatcattgacgagctatcgagattcgccggaaccttcactttgatatctaatggttaagcatttagaggaaactttactcattcacttattcaattacttttatataagcgagtgtgtcacgttatttccgaatcaattgcacttttgaatcatattgggctattattattttgatcagaacgtgatcggacaacttaaacatatttttcttataatcaaaaatattattgttttcactcaccagctcgaaaatcaactccttctcgtccagctgcttgagctcgttgcgtgacaaccgctgtggtcgctggtggcaatgatagtatggatattgatggccatttccggctccaccgctgccacccagactgggtgctcctcccgctcccgaagcgccaccggtgctgcccaagctgctgctcccaacggccccgcccgcctggtaatgactgtgctggctgtggtgcagatgggcatgattgtggtggtgctgctgatggttatactgatactgtccggccacaacgccaccgacattctgcagattgctgcagctgccgcctacgctgccgttgtccatcggcggaccaatgctcaaaaatgtgggcgtgccgtcgattgtgttgacaatcggtttcagcagtccgccacgctcaaactcgtgagcagatatttttctgaaaagaattcaataatcattagtatctttaaaaaagtatcttttaaagctcacaaagctggcaagtaaaggcttttcggctggcataaaaaaataaggatgtttggaaaatgcattcatttttgtaagtacgttacttcatcaatttattttgctgtaaaagtactctcctctacattttccacatggaatgctccagtatttaatttacgaagccccaattgaatcacttaccgcactggtgtggtggcaccggatccaccccgcgaggaactcgtctgtccattggcgtgtgtgggtgaggtgctgctgaccacatcgttgcccgccgatgtggcatgggaaaccagccaggcatccacggtctgacgtgtggctttcctgtgggaaatagacggtgaaattcagttagtaaacacgttaaaatcttattaaaaatcacaaatgaaaaggcgctggccgacgcattttgcgccgagttccatatgcttgtgccgcataaaagtgtctaatgaaatgccaactcataaatattcaggcagcgagactacacagcatcagctgctccaactcctgctcctgcccacaacgtgtccttttcggcacgcgcttttgacataaaatcctaccaaaacgccacaaaacgtcgggtaatcacagcacacaactctttgattaggaaaatatttaatgttttatatttaaatttttttataaccatataaatctaatatataagatataacgaaaccaaaaatttacattagccaaattgaaatttaacaaattatagtctaaatggattaagtcagcaataaatggtttagtaatttttcttaatgcttaattttttctgcagaaaagctaatactcccttaaatataaacaaggggcagaactactaccaaaatggttgaactgtttaggacatgcggcatatccttatgcaaaatacacacacatgagaatgaagcctttttcggcctcatttaatgaccgcccctcaggccaaaaagccggagtagcagtggagccgactacgttggccggctcctctcgaccatgaaaataaagcccaatttatgcttttagttgttagtgatttttattatgtgtcataggcaacggacgtcctttaacccgctttgctgccgggctgccctagatgtcctgctgtggcaaaggcaatttccggtttatggcggaaacgagccatccacgcccatggccaaatccccatcggcaaacccaattgtttgccgtacggctgtgtcaactgacaatgcagtttcaaatttaagaatttataccgtcgatggacaaaatagattattggctcgatgggttcatcgaaaacgcttgtaggcagatgcaatttatgtctctacaaggattcggttagttctctctgtctgtcttggctaacagaagggctatcgattggtcaactgggacgttttaagcagagttcgattggtttttggcaagtggcagtttaacaacaagccaataaataaattcggctcaaacatttaaatataataaataccatctaatatagttcctaattcgacatccgaattttacacagatacgaaaatagtaggaaacgaaaataa

SEQ ID NO: 42398 - DNA, 3855 bp, DROSOPHILA
atgtcaaaagcgcgtgccgaaaaggacacgttgtgggcaggagcaggagttggagcagctgatgctgtgaaagccacacgtcagaccgtggatgcctggctggtttcccatgccacatcggcgggcaacgatgtggtcagcagcacctcacccacacacgccaatggacagacgagttcctcgcggggtggatccggtgccaccacaccagtgcgaaaaatatctgctcacgagtttgagcgtggcggactgctgaaaccgattgtcaacacaatcgacggcacgcccacatttttgagcattggtccgccgatggacaacggcagcgtaggcggcagctgcagcaatctgcagaatgtcggtggcgttgtggccggacagtatcagtataaccatcagcagcaccaccacaatcatgcccatctgcaccacagccagcacagtcattaccaggcgggcggggccgttgggagcagcagcttgggcagcaccggtggcgcttcgggagcgggaggagcacccagtctgggtggcagcggtggagccggaaatggccatcaatatccatactatcattgccaccagcgaccacagcggttgtcacgcaacgagctcaagcagctggacgagaaggagttgattttcgagctggtgaaggacatttgcaacgagctcgaggtgcgcactttgtgccacaagatactccagaacgtgtccattctgctgaatgccgatcgaggatctctgttcctggtgcaaggacgatgcaacggaccggatggcctaaaaaaatgtctcgtctcgaagctgttcgatgtgtgcccccgcagcaccgtggaggaaatggagcagcaggacgaagtgcgggtggcatggggcacgggaatcgccggccatgtggccgaaagcggggagcccgtcaacataccagatgcttaccaggacgagcgattcaattgtgaaattgactcgctgaccggctatcggacgaaggccttgctttgcatgcccatcaaggattcatccggggatgtgattggcgtggcgcaggtcatcaacaaaatgaatggcgagtgtttctccgaaatcgatgaaaaggtcttttcctcgtatctgcaattctgtgggattgggctgcggaatgcacagctgtatgagaaatctcaactggagatcaagcggaatcaagtgctcctggatctggcacgcatgatcttcgaggagcagagcaccatagagcacatggtcttccgcattctcacccacatgcagagtctcatccagtgccagcgcgtccagatcctcctggtccacgaggcggacaagggcagcttctcgcgggtctttgacttcgaggcgaatgacttgagcgaggaggaggccacttcacgcaccagcccttacgagtcgcggtttcccatcaacattggtatcactggacatgtggccaccaccggggaaacggtaaatgtgcccaatgcctatgaggacgatcgcttcgatgcgagtgtggacgagaactcctgcttcaagcaccgatctattctatgcatggccatcaagaactcgctgggtcagatcattggtgtgatccagctgatcaacaagttcaatgagttggacttcaccaagaacgacgagaactttgtggaggcgttcgccatcttctgcggcatgggcatccacaacacgcacatgtacgagaaggccattgtggcaatggccaagcagagtgtcaccctggaggtgctcagctaccacgcatcggccaccatggacgaggctcatcgactgcggaaacagaaacagcagcaacaagctgtcggcctaaggcaagctcctctgtccctgcccccgcgtaaaaagcttcaacgtcgccttcgagtgccttcagctgtacactttcgactgcatgactttaagttcgatgacatacactttgaagatgatgatacactaaaggcctgcctgcggatgtttttggatctcgattttgtagaacgctttcatatcgattatgaagttctgtgccgatggcttttgagtgtcaagaagaactatcgcaatgttacctatcacaactggcgtcatgccttcaatgtggcccaaatgatgtttgccattctaactacgacacaatggtggaagatctttggcgaaatcgaatgcttggcgcttattattggctgcctatgtcatgatctcgatcatcgggggactaacaactccttccagattaaagcctcgtcgcctttggcgcagctgtactcaacctccaccatggagcatcatcactttgatcagtgtctaatgatcctgaatagtcctggaaatcaaattctggccaatctctcatccgatgactactgtcgggtcattagggtattggaagatgccattttgtccacagacttagccgtttatttcaagaaacgaggtcctttcctggagagtgtgagccagccgacgagctactgggtggcggaggagccgcgcgcccttttgcgtgcaatgagcatgactgtctgtgatttgtcggccatcacgaagccgtgggagattgagaagcgtgtggctgatttggttagctcggagtttttcgagcagggagatatggagaagcaggagctcaatataactcctattgatatcatgaatcgcgaaaaggaggacgagctgcccatgatgcaagtgaactttatagactccatttgcttgccaatctatgaggcctttgccaccctctccgacaagcttgagcctcttgtcgagggcgtgcgcgataatcgtggccattggattgatctggccgatgtcgtgaaaaccaaaactagtcaggatcaggagccggaggaggagcagcagcagcaaaatgtgatatcgaacggtgactgcaaggcgatgagtgatgatgatgtggctgcatcggaggcggaagtggcagtggactccccgagcgagaaagcaagcgtaaatggctccaacgttgccaacaacagcagcaacactaataagaaaattgccgtcgcttctcatcccaccagcacccagcccagtgatgatgataatgatgtagatgcagatgcggatgacgtggacgaacaggccgccgaggagaatggtcacgatgctgaagtggatgaggcatcctgccgttctaacagtacctgcagctcctcgaccgcctcaagttgtctgtccacgccaccgcccaccggcgaggatgacagcacgccagtctcgcccttgaaaacccttcaggccaagctggtggcagccaatttgaatgcgctgcaacggcagacgtccaatcaggctcagacccaaaagcagcgttgcaagagttgcgaccattcgcgcagtgggctgcaggttcggaagaccagctccctgcgcggcgcgcaagaactcgatttggatagtaagacaagaaatggaacgcacgctgctctctgcaaaagcacgccagtgatcaacaaccacagccatcatcataatcatagtcacagccacaaccacaaccaccatcatcatcatcaccatcactcgcatcacaatcacagtcagcacggaatcgggattggcagtgccagcatcggtggtagtgggctaatcagcctgaccacaccactgctggctatggacagtgataggataccaaaaatcgtaggcaaaattggaaatctcgatggcctgcccttcgccaatggcattggaggtccacaaaatggtcatgggttgcccttcggcagctatcagcatcatcatcatcaccagcatcatcatcatctactggcgcgtcggcattcggagacaaatagcaatggggccaccgctatggcggttgaaaaataa

SEQ ID NO: 42399 - protein, 1284 aa, DROSOPHILA
MSKARAEKDTLWAGAGVGAADAVKATRQTVDAWLVSHATSAGNDVVSSTSPTHANGQTSSSRGGSGATTPVRKISAHEFERGGLLKPIVNTIDGTPTFLSIGPPMDNGSVGGSCSNLQNVGGVVAGQYQYNHQQHHHNHAHLHHSQHSHYQAGGAVGSSSLGSTGGASGAGGAPSLGGSGGAGNGHQYPYYHCHQRPQRLSRNELKQLDEKELIFELVKDICNELEVRTLCHKILQNVSILLNADRGSLFLVQGRCNGPDGLKKCLVSKLFDVCPRSTVEEMEQQDEVRVAWGTGIAGHVAESGEPVNIPDAYQDERFNCEIDSLTGYRTKALLCMPIKDSSGDVIGVAQVINKMNGECFSEIDEKVFSSYLQFCGIGLRNAQLYEKSQLEIKRNQVLLDLARMIFEEQSTIEHMVFRILTHMQSLIQCQRVQILLVHEADKGSFSRVFDFEANDLSEEEATSRTSPYESRFPINIGITGHVATTGETVNVPNAYEDDRFDASVDENSCFKHRSILCMAIKNSLGQIIGVIQLINKFNELDFTKNDENFVEAFAIFCGMGIHNTHMYEKAIVAMAKQSVTLEVLSYHASATMDEAHRLRKQKQQQQAVGLRQAPLSLPPRKKLQRRLRVPSAVHFRLHDFKFDDIHFEDDDTLKACLRMFLDLDFVERFHIDYEVLCRWLLSVKKNYRNVTYHNWRHAFNVAQMMFAILTTTQWWKIFGEIECLALIIGCLCHDLDHRGTNNSFQIKASSPLAQLYSTSTMEHHHFDQCLMILNSPGNQILANLSSDDYCRVIRVLEDAILSTDLAVYFKKRGPFLESVSQPTSYWVAEEPRALLRAMSMTVCDLSAITKPWEIEKRVADLVSSEFFEQGDMEKQELNITPIDIMNREKEDELPMMQVNFIDSICLPIYEAFATLSDKLEPLVEGVRDNRGHWIDLADVVKTKTSQDQEPEEEQQQQNVISNGDCKAMSDDDVAASEAEVAVDSPSEKASVNGSNVANNSSNTNKKIAVASHPTSTQPSDDDNDVDADADDVDEQAAEENGHDAEVDEASCRSNSTCSSSTASSCLSTPPPTGEDDSTPVSPLKTLQAKLVAANLNALQRQTSNQAQTQKQRCKSCDHSRSGLQVRKTSSLRGAQELDLDSKTRNGTHAALCKSTPVINNHSHHHNHSHSHNHNHHHHHHHHSHHNHSQHGIGIGSASIGGSGLISLTTPLLAMDSDRIPKIVGKIGNLDGLPFANGIGGPQNGHGLPFGSYQHHHHHQHHHHLLARRHSETNSNGATAMAVEK

SEQ ID NO: 42400 - DNA, 3824 bp, DROSOPHILA
tttgttctagaatgtaaacgaaggaatattttcatttctcgtcgcaaaatacgaaatttttaagttagctatatagcatcggggcactttcgcaatcgcggcacagctttatatatgtatatatatttatattaagtgcgtgttctgagcgtttcgcacagtgtatcgtggttaatcttctgatggttacgcgacttggatgcaattagacttgaacttttgaacgctccgtacacgagtagtttaaagactaatcgccttcgccactgtgactgagtgaaaaacgagtttgtaatccctcttacggatcgtaagtgtgtaagttattgctttggctatcactcctcccgttcgacacaacagtaactttctgcttttctgccggacactagctaatgtaccttctttcgactggcgtgtccgcgttccacgatcaagtgatcaactgactgacgggggctgtgggtaattcgagctcatttgcttttagtttcaagcacgagcaattaattaagtatttcactgctcgccgtttccaaatgtatttccatgccatttcttgcgcttgcctgagcccattctgcgtgtcggaccgccattccgccatttagccattcggtcattccgtcctccagtcagacgatcaccttcgagcacggagctacgtcagcctttaaagtccggcggaatttcgttgggcagccaagtgcaattagctaagtcgaagtacagaacgctgaaagttaaaagtaacccactgatggcattaatcaatttacgaacacgcaatcccagcgacagctgttgatacgcacagcgcgcttcacatggacatacagacagacagacggacagacactccattatctattaggtatttacatgcatttaatttgaatgtcaaattcagatttatggcctagcctatgagagttacaaacaatgagagtcgattacatatgaatttacacctatttctagttctacgtatgcatatcgattcaattcatccattcattccgttgtattgtcgagtataaaacgtacatttgactaatcatatagagatattgtgcagacaattgttgctagatattgcttacgatgaactacaaaagcgttctcgcctgttttatacgtttaaagcttagactacgtacaaaaggtttgggttagtaatatgtcaacgatattcaatgctaaagtcttaggtagcgcttaagtgtacggatgagttactcttaagtacagatcaaatctatgcgaaggagaattacgtatttacaatacaattgtcggagactcctggttagatcactggagtcggccgaatcctcgctctgcgactccgtcgcctcctctgcaatcatttgggccgaatcttctcgtacatgaatttctgcacgtgcttgttgtccggctgcatgagcttcttcttgttgaactcgaattgggccagcgcgaaatcgtacagatcgttttccatttgccagatttttgtcttttgaatggatttaattgtcgattcgctgggcggaagcttggaagatgtcacccgcagatgagatttgtttgaattatgatagtgctcacgaaagccgtgaaaaattctgcaaaagaaaaaaaaagaacaggtcaatgaagcaactggagtattctaaaacagacaataacatatggttgggaggcacaccttggaagggatctctcgagcagatccacaaactcgtacatctgctctgtgactccgactaggaagtattcgttgactagattgcgcttggcctggtccaaggcccaactgctgccgggttcccagcactcggctgcatggccacagaagaagggtatctgcagccacatgtttttgggatcacagtcgggttgtttctgcaccacgcactcatcgaaggtctgcaaagatgtgtgagggctttggttacagggaggttaataccttgatgctctacctacaattttattgcccgccttcttgcggactaaattcggtcggtagttgtcgccaaagcgtagaaagtaatagtaggagacaagtctgtcgagcggtttgcgcaccaaattgatgtagatgggcttgtgggcgatttggaatctgcaaaggagtaatgcaattgagacgggctctgctggattggctagatgttacctactttgagaagtctaggaaggccatgtggccgtgataaagagctggcttcatctcgtgccacctggaaacattgcgcacgaattggatttgattgggaagcgagaggacgtgcatgttggcagtgacattgatgtgcagcacatggaatttattgggcttgcacagatcgtatgctatgttaacaaagctggtggatcccgttttcggtacgcgattgtaaagcaccactaggtgctcctcgaagtcaaagtcatcggtggtggacgaggcatgctgatctgggctcagagaatcgcccagcttggaaagcggcttgaaggctgcacaaagtaggtaatgggtgtaaaagtgatatggttttgcctaactaccggactccacttaccatgttccaggcgaatctctgaccaaagcaaccagtaacctgcacaggtgaccgcgcacagggctatcaggatcagccagtgggtgggtcggagcagaatccacatcttaagcagtttcctaaacatgcctcgtgtcggtttgccctacaggtcagcacggtagctcatatcagcgtatttatttcagcataatctcaggtcgttgttttccttgttttttttctgcaaccaacatcgagcagtgttggtcagcagctgctggacagtgctgcaaggcactgaaatctggtgaatctgtgggaatgtgcagctgtagctgagatgactaaattagtgatggaaaatagctcaaaatgctagctcggataattgcatttaatttccagctaggaatccgtaaattaattgccttatatttataacttcaataaatatgtttttcctaaaacacaacacagaatattttaggccagtcacaaccagatctgcatcacccttcagcaacccttttgccttgagcatcactgtttttattagtgtgaccacccttgccggcaaataataccaagcaatgccaaaattctagcgcccatttttgcgaggttaaaataaatttcgcaagccggctgcaatcgcaaagtacagtgcgacttatatacactcgtataaaataattccatttaaaagcaagcatgtccacctttaacttcgccagcatggccgcccaactgggccaggagcagggaatatcattcgagaacaaggtgctttcctggaacacagctgccgatggtaagtttgggtgacgctttgggtactccatgcagtggctatattgaggctttttacagtccaggatgtggtggatgcccttaacaaacagaccaccgtgcactatctgaatctggacgggaacacactgggcgttgaggccgccaaggcgattggtgagggtctgaagcgtcatccagagtttcggaaggcgctgtggaagaacatgtttactggtcgtctcatatcggagattccggaggcactcaagcacctgggagccgcgctaattgtcgcgggcgccaaactgacagtcctggatctcagcgacaatgccttaggaccgaatggcatgcgaggcttagaggagttactgcgatccccggtctgctactcgctgcaggagctgctgctgtgcaattgtggccttggtcccgagggcggtagtatgctgtcccgggctctgatcgatctgcatgccaatgccaacaaggcgg

SEQ ID NO: 42401 - DNA, 1558 bp, DROSOPHILA
cactgtccagcagctgctgaccaacactgctcgatgttggttgcagaaaaaaaacaaggaaaacaacgacctgagattatgctgaaataaatacgctgatatgagctaccgtgctgacctgtagggcaaaccgacacgaggcatgtttaggaaactgcttaagatgtggattctgctccgacccacccactggctgatcctgatagccctgtgcgcggtcacctgtgcaggttactggttgctttggtcagagattcgcctggaacatgccttcaagccgctttccaagctgggcgattctctgagcccagatcagcatgcctcgtccaccaccgatgactttgacttcgaggagcacctagtggtgctttacaatcgcgtaccgaaaacgggatccaccagctttgttaacatagcatacgatctgtgcaagcccaataaattccatgtgctgcacatcaatgtcactgccaacatgcacgtcctctcgcttcccaatcaaatccaattcgtgcgcaatgtttccaggtggcacgagatgaagccagctctttatcacggccacatggccttcctagacttctcaaaattccaaatcgcccacaagcccatctacatcaatttggtgcgcaaaccgctcgacagacttgtctcctactattactttctacgctttggcgacaactaccgaccgaatttagtccgcaagaaggcgggcaataaaattaccttcgatgagtgcgtggtgcagaaacaacccgactgtgatcccaaaaacatgtggctgcagatacccttcttctgtggccatgcagccgagtgctgggaacccggcagcagttgggccttggaccaggccaagcgcaatctagtcaacgaatacttcctagtcggagtcacagagcagatgtacgagtttgtggatctgctcgagagatcccttccaagaatttttcacggctttcgtgagcactatcataattcaaacaaatctcatctgcgggtgacatcttccaagcttccgcccagcgaatcgacaattaaatccattcaaaagacaaaaatctggcaaatggaaaacgatctgtacgatttcgcgctggcccaattcgagttcaacaagaagaagctcatgcagccggacaacaagcacgtgcagaaattcatgtacgagaagattcggcccaaatgattgcagaggaggcgacggagtcgcagagcgaggattcggccgactccagtgatctaaccaggagtctccgacaattgtattgtaaatacgtaattctccttcgcatagatttgatctgtacttaagagtaactcatccgtacacttaagcgctacctaagactttagcattgaatatcgttgacatattactaacccaaaccttttgtacgtagtctaagctttaaacgtataaaacaggcgagaacgcttttgtagttcatcgtaagcaatatctagcaacaattgtctgcacaatatctctatatgattagtcaaatgtacgttttatactcgacaatacaacggaatgaatggatgaattgaa

SEQ ID NO: 42402 - protein, 349 aa, DROSOPHILA
MFRKLLKMWILLRPTHWLILIALCAVTCAGYWLLWSEIRLEHAFKPLSKLGDSLSPDQHASSTTDDFDFEEHLVVLYNRVPKTGSTSFVNIAYDLCKPNKFHVLHINVTANMHVLSLPNQIQFVRNVSRWHEMKPALYHGHMAFLDFSKFQIAHKPIYINLVRKPLDRLVSYYYFLRFGDNYRPNLVRKKAGNKITFDECVVQKQPDCDPKNMWLQIPFFCGHAAECWEPGSSWALDQAKRNLVNEYFLVGVTEQMYEFVDLLERSLPRIFHGFREHYHNSNKSHLRVTSSKLPPSESTIKSIQKTKIWQMENDLYDFALAQFEFNKKKLMQPDNKHVQKFMYEKIRPK

SEQ ID NO: 42403 - DNA, 6720 bp, DROSOPHILA
tggtgcagcggcgcatctgttgcacaggcggaggaggcggtggcggcggcgtagggcaggacgcggatggcgatgatgccgccatgcacagtccgggcaagaaagtgttcggccagaagcgcaacgccagcaaggcgccagccaccaattatcggctatgagcagacagacaggagctgtcaggaaacttacgcttaatttaaccactcaccccgccgggttgaccttcagattcaatgcattccagtccgcggaggggcaggagcttcagaccgaaaggcaacccatccacccaatgttgatggctgtagagagtggattgcctcgttgtggttgatattctaagggaactatgcttcacagcgagctaactatgagctagcttctatgtcaagaataggatctccatttttacttgctatgctttaatattatcttactaagttattattttgttatgttaccgtatcgaatatatgcggtatgaaatactcttataacaatcgtatataagctttaccataaccaagtgtcttgcttgaggaaagcaagctttaggtgtctaatgtactacgcataaggcaatcagaatgtaatcactacattttttccttatatattgcataatttcggagtgccttaagtgtgtttatctgatgtgaaagctgggaacaaacgaataaatatgaataccgcacgtgtttgtttacaaagtatgtttatattttaacaattggtttaatgtacaatagtaaaatgatataaatacgcttaccccggattaaaataatatgcatgtaggtataacacttcttctggctgcgatcgacactccgatcctggttaagactaaggcaaactctaggcgctactcactaacaggacaagcgtatggtagatcgagtgcttaactataacgctccacgtgggcttaatgtgaagacgtgtggaaacgagtggagttgattatcacgagcagcaccaggccggtggccacagatcacttcttcttgtagccgtacgagttgatggtgtcgaactcggtgtcgcacttgagcagcagctggtaccactggtcgctgtcgatgcggctggcctcccggaatcctccgtaggcggctggcaggcacttgggcgacatgtatttgtgcagggactcgcgatcggtgccatggaagatgatcctgctgcgcagcttctccttgaggaagggcttgaacagggcaaagaccacctggaaaatcttcggctggttcacgatgtgaatggccttgatccggagcggcaccgagtcctgaagccagtccacaatgcgcttggcgaacggaggcgtaaactgccacgtttgctggagactgaggccatccatgtcgaagatcacaacggctccgcagatctgtgtttctggctccagcatggccgcctccaggaagagcacagctcccttgaacacctcatcgagggtgacctgcttgtgcttccagcgctctgtaatcggggattacgaaagattaatacaggatctgctcaatgcttggagcaactatgaaacttcaaatgataggaaaacctgcatcttaactaaaataaactttactctgaagatcgagatctttgcactcaaaagctaatatattgaagtatccttctttcagtgtacttactgcccagttcgaggaccaaaatgcgacgacccagttgatctcggttggggaagacggtaaggatgttgtgcttgaagatgttggcctcgttcgatggcttcaggtcggtgtacacatccgcgtgcttcaccttgaaggcgtagtaccgcttaatctgttccatattcagaatatatacaattagtaacacagctggaaactgggttgccacactagactcaccagatcacgggcactttccgggtaatacttgcagggccgcaggtatctgatcagccactcctcgtttcccttggggtacagcaagtccgtctccgctggaagcatatcgcaaatattaatcgacctcaccttcaatagtcttaattctaaaaagtcactaaaccactggcattaagtttatccagcaattaaaaggcaatcgtaatttgtaacaatagttacgaatcttatgcaacgaaatcctctcgagggcgcgctgcttttagccccaacttgttattagtgacacgaagtcgccaactaatgatatagaactattcgttcgaacttggtgtacaaatggattttcaattcccaacaatcgggtaaattattagatgcaggctaagtacgaagtttatggcttaagttttattaactcaagtttttatcagcttttggagatccctcggatataaattatgaaaatagcttagcaaaatgcatattgtatgatctcagttcagatatatgtatatactttaaacagatgtaatgcagtttcaatgactttcatcatgtgagttttaactcatgtagttaatgtataattatattgattcaaagtaaaactccatttctgatcacgactcaccttctagaagacgggccagctccttggaggcctccttctggcgctcgggtgtttcgcgcagctccttgatggccacctccttgccctgggcagtcggctcgcccaactcgaactggagcgtgtagtcgcccacctggagcgtgggcagttggtcgatgtccgacagcatggtgggtactcctggaagggaagcagttggggttcggttagcgacagcttctgtactttgagctggggctgcgggtttcacactgagagcactgggaactttggccaactaaataacttgagctaactgacatcgattgccaattagttgtcatacttcacaattactacttactcattttgcaattgttgctgctctggctgaactgaaattattctgcgattatattaagctatgtgctttttctaagcggttcgccgctgtatattttcagtttgccaaatgtaaaattgtgccctctatttataagaagaaaaaagcgtagagatttcaatttattagcgagacacaagtgactcggaaccggctcaactgcatcgagtttctagactttcccgccagtcaatgcgatgatcgtctaaacatatccatatatgtattcatttatttattaatcacctggccgaccttcaccttgacattcgcaaattgcttaaaacggaagaagaggccagagattcgcgaagataatgcaattcttcagagatcagaaaataacgttaggagccttgaactaaattctggagacacttgacgcgttctacttgagcgtaatttccagttaggcaggtttcgaattgcgagatgaggagccagggtctgtgagcttatatagtggggcagttggatatcagaaattagcacactagatttcccatcaaatcggaaattagcgctgaagatttcccatcaaatcgaaaattagcgttagtgctggctcgaaacaaaagactaggagattagcatccgaagcgctgacattgaaaattgctaccaatttcggctagatgggccaggtgatttgcttagggtatcgtctgtttttgcattcatgaatgatacacaagagtctactgaatcgctgatgttgtgtctgggaaaatacgagatcttaaatagtacacacggatcacaacacaacacaagacaacacaacacgaccgaaactagtttggcccaaacttaaaggctataatggtataatggctaacagtattccgcaaagacggcccaaaaaaccagctgcgagtgacgcgtgcaacggagctgaaagcccagatgaaactgttgcggccaaaagcgcgagtcgagattttatgccaggccaagaattaaaactggaattgtgagcggagcggcatgagagtgggtgtcgccgatcgagacgccagtgctgccaagtgggtttgtttcccgacagtaactacttctgctataagggggtcttttaactatagttgtttaatgctttaatgcaccaaaatgaagtagtttcaacataataagcttctactgaaacatatattttcttgcttgcttgcactagtgatggggaataactatataatgctattatatgaaacaagttgtgcacccattaagtgatcatcaccagctgaatctgaacttgagcatgacattcacgtgcctcgcaagagcgtggagttgctagatggagagacacatggagtttgcccagggagagcgagcaagctttactgggtctggggtgcatcgtcattgggaaatgatgccaccgccacctcaagccggtttcagtttcgctttcaacttggacttgcctaatttattcgggttttcttcgggtaatcgcccacagtactattgggctcttgaaaatcccttggcataggcatttcccatcgcgaccctgaagccccgtgcccgtgcatagccatccggtttcaatgctgcccagctacacgccaattagtgcttacacctgttcggcgtacctacacctggggtcaccccactagcaatttgttggagaccacaaacattggacacttgaaagcatcttcaactatttatagatcatagttatagatcataagatcgcatctaatgacaccgcatcaccatgtcatatcatatgtccctattttctcagccccatgtgttaagccaggcatatttggtataattaacacgtcccaaagccgagcaccctctgcgttgtggacagcaaatggttcccgcccggttttggacaaatcggttcaatcgcacgatcgcacgtgcgaagacttcggccattcatggatacggatttacgttgcgatgatactctcgatttcattacggccagtttcggtcatttggtcaatttttattggccatctcgaagcggatgctgacgaaaactgggtggtacaaagctgcgagtatatggaaaaaacttgaagcgagtaatatgagtaattctggggttacgacccattgcaatgtcaaccttcgcccttcggttttttctttgcaaaaagcgtgttaaaaaccctgcatgagaaacctgcttttgaagaacgtgacaatggcggttcaaaagcaaaagtgctttgaccttactcaagagatggaaaaagtacaagtcggtagatattactgacatcgaacaaatggattgttacatgaatactcgcttgatgtccaaacaatttagatggcatatcaaaaggcattgcaaaaagtgttgttttttttaaattatttatattttgaataccttttaaatactctttctcgaactaatcgtgactttcaattaccagcacaactgtatataagtttttaacaaactggtgtatagtttttcgagcaactgtagccacgcgccttatataaatacatacgtacgtatatagaaaataattctatttgagggagataattctaagaaaatgcatatagtacttgcaataaatatacgataaaaaatggggttcggcagatttcgctattgctcaccaagtgggaattcagagggcaggcacctcatcgcagatgcagtggtcagcatggtcatggcgatgcagatcgaatgaatacacacacaagttactttacaactaactaaaccggtatgcacatgcaaatgctagcgtatgtaaataaattaatatttctttattcaggctgatcgagtcgggagcatcggcggtggctaaatgggtcaatgtcgtcggcgagttactgaactttgtctgaaattctcgagcgacgagtgcgaaaggggggaatgcatgcaacagtaatgagcaaaaggcaatgcaaaaaacacggacagacagtgatgcctcgtaaataagggctgagcgtagctacatagtgatagtgatggtgatctggctaagatatttttatggtccctagcgctacacactcagaaatgcactcttaaaaagaaaagcactctatatgtatatatatatacaaatgtatatatgagatccaattactcaccttgtttgaattgaaaatcggctaatccacaaatagttggctggtacagtggaaatccttcggaactcccgttcgactccgatatatgtacctagtgagcttgggtcgcgtttgaagactgaaaatacaaagctgcttgtcaaatcgttttatagccgccccttttatgcactgcgtgcattgcacatatgtattgtacgacaaagttatagttatcaagatatatacataggtcggtcggaatagtcgggcactcgtaaggccagcgcgacttaataggtcattataagcgaccgattcgagttaagagctctaaagatcacgtcgcgaatcgccgcatgggatcttcttttttttttttggcttgttttgcataagttcacctgaaaatggttcactgagctcagcattaattttatgttatttccattgtttttagtacgttaaagtgccaagacaagtgcggtatttctcacggtgcagcgcactcaatcgattttccacagcaattaacattattaaatataatgttgcagaaggtacactgaaagtaagtgagtactacaaaattcaagaactttcttcactttgtgtgcacttttagaaatgttcttgacttaaaacaatatagttattattattattattgaaaaaatccgtactttctatcaggaaatccactttgctatattttgtaactatataca

SEQ ID NO: 42404 - DNA, 1119 bp, DROSOPHILA
atttagccaccgccgatgctcccgactcgatcagcctgaataaagaaatattaatttatttacatacgctagcatttgcatgtgcataccggtttagttagttgtaaagtaacttgtgtgtgtattcattcgatctgcatcgccatgaccatgctgaccactgcatctgcgatgaggtgcctgccctctgaattcccacttggagtacccaccatgctgtcggacatcgaccaactgcccacgctccaggtgggcgactacacgctccagttcgagttgggcgagccgactgcccagggcaaggaggtggccatcaaggagctgcgcgaaacacccgagcgccagaaggaggcctccaaggagctggcccgtcttctagaagcggagacggacttgctgtaccccaagggaaacgaggagtggctgatcagatacctgcggccctgcaagtattacccggaaagtgcccgtgatctgattaagcggtactacgccttcaaggtgaagcacgcggatgtgtacaccgacctgaagccatcgaacgaggccaacatcttcaagcacaacatccttaccgtcttccccaaccgagatcaactgggtcgtcgcattttggtcctcgaactgggcaagcgctggaagcacaagcaggtcaccctcgatgaggtgttcaagggagctgtgctcttcctggaggcggccatgctggagccagaaacacagatctgcggagccgttgtgatcttcgacatggatggcctcagtctccagcaaacgtggcagtttacgcctccgttcgccaagcgcattgtggactggcttcaggactcggtgccgctccggatcaaggccattcacatcgtgaaccagccgaagattttccaggtggtctttgccctgttcaagcccttcctcaaggagaagctgcgcagcaggatcatcttccatggcaccgatcgcgagtccctgcacaaatacatgtcgcccaagtgcctgccagccgcctacggaggattccgggaggccagccgcatcgacagcgaccagtggtaccagctgctgctcaagtgcgacaccgagttcgacaccatcaactcgtacggctacaagaagaagtga

SEQ ID NO: 42405 - protein, 322 aa, DROSOPHILA
MLTTASAMRCLPSEFPLGVPTMLSDIDQLPTLQVGDYTLQFELGEPTAQGKEVAIKELRETPERQKEASKELARLLEAETDLLYPKGNEEWLIRYLRPCKYYPESARDLIKRYYAFKVKHADVYTDLKPSNEANIFKHNILTVFPNRDQLGRRILVLELGKRWKHKQVTLDEVFKGAVLFLEAAMLEPETQICGAVVIFDMDGLSLQQTWQFTPPFAKRIVDWLQDSVPLRIKAIHIVNQPKIFQVVFALFKPFLKEKLRSRIIFHGTDRESLHKYMSPKCLPAAYGGFREASRIDSDQWYQLLLKCDTEFDTINSYGYKKK

SEQ ID NO: 42406 - DNA, 2902 bp, DROSOPHILA
cggtggcacttgctgcaggacctgtggctgttgcgtcgctggagtcatgttcccgctggcggcgaccgctcctagcgcaccgtgcggcaggggctcctccagagcgccgggcgtttccagttcgccgtccttgtcgagctcctgcatgaccgaatcttcggaggcgtccagtcttcccggactgtcctccagggctgcacagctgctggccgccagggctgcggcgtcggcgatgctgctgtcgtcgattttcttgccacgaccgcgtcctcggccacgtccgcgcccgcgagccctggtgccacgccctcgtccgcggccgcgcttcacttcctcggtgtccattgttcacttgtacttgcgtgggattttatgccggtttttaagtttttcggtttttgtttagctccgcatttgcgtttggccagggttgtcagctgttcccacatacgtgcagtaacttagggtgaccagtctgcgcctaacaacactggccatcaaaaggtccggcatcactggtcagtttaaaatacaatatttttacttgtttaattttaattttatctgtttttcaattatttttaaactaatttgaatttaatgaatgtaaaaaaaaacataaaaaaaaacaataattataagcatctatttaaccgttcttgtatcatattaatagcttactaatttcttttgtagcttcaacatgaaaaaacaaaagtattctgaatagaaaatgtgagatctacattaagataaccttaaaaacttaataataattaataacaaggtttaaaattagttttttcgtatataaatttgaatttgtaaaatgtttttttaattacaattaaatagtttttattacaagttatatttttatactatgctttaaaaaaaatgatttttggtatttgttgcctaaaaatatcgtttatcccctttccttatgctttaaattgcgctcgaatttatgcaataactgagttgagtagttcttcagctagaaatcggggtcattcaccttgggtgcaaggtagtatcgaatgtggccgtaatcctcgatgggatactccaccaggagtggccgctcgtcggacaggtagagcttgacgcgatctgccagcggagtggccttggtgaaggtgttgaggtagcgaccggcgaaggactgggtcacgggctcctgcacctcaatgctcacgtccatggcggtgcccgcactcagctgaatgttggccgtgcccagatctcccttggccaagaacctgatgcccttcgaggagcaggcgatcgtcagggactcgtcgaacatgctcatgtcccggcaaatgcgcgcgaactctgacgacggcaactggatgaagcaggtgtagtcctttttcggaatctccatgtgatcctggtccagattgaggagcttcagctcgtagtccgccgtgcgctccttgccatccgactcgaagctgagcgtaatcttctccggtctgtcaacggccttaatggtgaccgcatcgtcgctattggcgcacttaagcaccttgcccagggatttcagatccaagcccagcgagacattgcgatcgcagtgaaacttttcaaaacaatccgaagccagacttagggccaccagcgaaacgtgggagttgtccatcgattgcagctggaatatagagttgtaaaagctttatttcttatctcaacttttcattttcagtcccaagtctcaatggaactacttaacagcttttatgggaattcgaaacaaaatgacagatggagggttattctcttcacctccagaccattttcactgcagtccagcgttccctgggcgatgatttcctttagtgcatcgacgatcttcttcagcagcaaagtctgactcaaacgcgcctcgagcatttttccaattttcaaaattgacaatcgctgtcccgttaaattcacaattggaaacaaacaaaatgaagccagtcagctgtttcgctgcaagtgtagagatgccggactgctgcggagttaagaacaaagcttgttagattagtttcggttgcggatttaagttcatttgatgtctgatgatgaagctagtgaacatagatcttagaatttgacttaaagctgtaggttaatccttttctatttaagggtatccaattgaaatcacttaatccgactgatctggcagcatctgcaacactggttccggctccagttctagttcgagatccagttccagctcggatccagccatccaatccaatatgtttacgctttatttatttatttgtttatttataaccaactgctgagctccccgatggccgccgcgcaggtggagatgcacgctgctccggcggctccccatgtcgatcgaaatcccagcagcgactggcgacagtggtgtcgcctgtgcgccaaggacgacgtgcaaggcaacttgaatgtgttcctcaagaacgaggattccggcgaggcagcctccatggaactggccaccgccattggcaagtacttctgggtgaatgtgagtgcgctcctcgtggctccttggatttccacaagctaaccagcttatcttgatttctcttgccccatcatcagataactcgaggtgaagagctgccggagacgatatgcagtgagtgcctgtcgctggtcacctcgctggtgaatttctcggaacggattacccgcgtgcagaagctttactgcatcctgcagagcacgcccagccaggagaggccaaatctccacgagctgcgctcgaaatttggtttgctggacgaggagacgcagactgaggtgcactatgtggacaagaagccgaagttggatgaacagctcgagtttctgccagaggagtcgccttacgagctggcaaacccactaacgccagagg

SEQ ID NO: 42407 - DNA, 768 bp, DROSOPHILA
atgctcgaggcgcgtttgagtcagactttgctgctgaagaagatcgtcgatgcactaaaggaaatcatcgcccagggaacgctggactgcagtgaaaatggtctggagctgcaatcgatggacaactcccacgtttcgctggtggccctaagtctggcttcggattgttttgaaaagtttcactgcgatcgcaatgtctcgctgggcttggatctgaaatccctgggcaaggtgcttaagtgcgccaatagcgacgatgcggtcaccattaaggccgttgacagaccggagaagattacgctcagcttcgagtcggatggcaaggagcgcacggcggactacgagctgaagctcctcaatctggaccaggatcacatggagattccgaaaaaggactacacctgcttcatccagttgccgtcgtcagagttcgcgcgcatttgccgggacatgagcatgttcgacgagtccctgacgatcgcctgctcctcgaagggcatcaggttcttggccaagggagatctgggcacggccaacattcagctgagtgcgggcaccgccatggacgtgagcattgaggtgcaggagcccgtgacccagtccttcgccggtcgctacctcaacaccttcaccaaggccactccgctggcagatcgcgtcaagctctacctgtccgacgagcggccactcctggtggagtatcccatcgaggattacggccacattcgatactaccttgcacccaaggtgaatgaccccgatttctag

SEQ ID NO: 42408 - protein, 255 aa, DROSOPHILA
MLEARLSQTLLLKKIVDALKEIIAQGTLDCSENGLELQSMDNSHVSLVALSLASDCFEKFHCDRNVSLGLDLKSLGKVLKCANSDDAVTIKAVDRPEKITLSFESDGKERTADYELKLLNLDQDHMEIPKKDYTCFIQLPSSEFARICRDMSMFDESLTIACSSKGIRFLAKGDLGTANIQLSAGTAMDVSIEVQEPVTQSFAGRYLNTFTKATPLADRVKLYLSDERPLLVEYPIEDYGHIRYYLAPKVNDPDF

SEQ ID NO: 42409 - DNA, 3101 bp, DROSOPHILA
aataatgaaaaagtaaaattatattgttgtttcttccttttagcatcctttcttaaggtatgccatcgcaatgcacccgacctagacacctgtgttcgagaatcttatgaggaactacgtccaaggcttatggaaggtataccagagctatatatacctgccatggagccgctggttgttcctcaggtcaagatggaccaggactccggggccatatatttgcactcagtgtaccgaaatgtcaaagtcacaggcatctcaaagcacacggtcaatgagctgcgtctggagccttcaaagctcaagttcattttgtctctgaccttcccaaagctgcatatggaatcggactacagcattaaggtcagtagagaagtatgaatattgtcatttcaacaatttaaactaaattgacttaactaaaactgttatattattttagggaaaaattatgatgatgccacttttgggcgatggccactgtaaggtggatctcggtaagctaaaagagtcaagtctttacagtctatatatatttatttgtaatattcctgcagttaacatcaccatgcgaaccgagctgattggacaggagtacaaaaagaatggagccaactttttgaagatcaacactgtgaaggtcaagtacgagctatctgatgtccacattcatctggataaccttttcaacggggacaaagctttgggtgatcgcatgaacgagtttctcaacgagaactggaaggcactggccgaggaagtgcgtccgttgatgaccaaggcgctggtggacattttgagggcctccgtggataaattgtttgcttcttttagctacgatgatctgcttcccatgtaaaatatctagtgaagcccattttttttctatcttactgatttaatcgtagtacaaacagtagcctacaaattaagcagacagttaaaagcgaaataaattataaatataatacaaaaacggcggacgtggtcctgaagatcactaaaccagccacagtttggtgggcatcttggagaagacattgttccacagtccatgaaagatgtctgccagtcccagttccaggtctggacgcagctctgctatcacctccttgccgttttgattcagaaaggagttaatcgatgccgcgagaatttcgtttccgttgaatagattcttcaggtgtattctcatggcgcctacatcgaagccaaccttcatttcatcgatatggatgatctcgtcgcccgtgcgtgtctcgttccgtagagagatccttgtgtacacggttgtgtgtacgttcttcagcgccatagccacgtctccactgcccacaaggggcaaaagtaggatatttcccttcaggttgtacttcgcccggatcctaagccttggaagttccagctcgaaatttagcaatcgccgctccagatccaagctagagagtaacggagcgaaatgagtgtgtttgttagtagctatttggtgctatttgtgagttatatttaattacctggctcgtcgcacagtcgcgttggacggccctcggatgaccaggtcttgaaatcctccggatagcaccaggttgccgctgcccttggataccgacacctggtcaatgtttaggggctcaaaactctttactccgatctccggaatgccagcggctagtgccggaaagcatccctcgaagagctgccgaaagcacttgtcctcgttcggattagagcgtttgcacgtctgcagccacgaggctgcgaggaaaggtttggtttatacatttgatttccaaaattaggtctttcgatacatgttaactttaaatatagactcaaatttactacttagtttgctttatctttttcaaaactgatctttgttctttaaatatacatatatatatatgtacatctgtgtatatgtatatataggtatatatttcgggtctgttggccaactctacttacgcctctcctgcaacggcagcttgtcgttgacaatttcgcgagtatacgccccgtgtgtgaccgttatcaggcaaatcgaaccgaaaacactcaaactaacggccaacttccagtatgttgtgctaacagccatgtttacaagcaaacgaaaactaaagcaaattgtatcctttggatcggcactttaatccgtggcgtgtaatctgctatccgttgagcgcgaccgttggcgacgatggctcgagaccaagtgccgggatagccaagagaaaagtcgaacgaaaccatcaaaggccaagatggccaacaatagttttgtttttcgttcgctgcttttgcggccagttttacatacactttttttcccccgcactggcgtaacgaattccgcgatttcggtactacccgtttatccgactgacaagtgaccacgggaagaaataaaaaaagattttgaaagcaatgcacttttaaggaattgattttcttaaaaatattgcatgtgattatcattaaaaatatcattcaagtgaaatatgttgcatacgttttggtgtttaaaagaattgttctttctacagaataagtcacgtataaatgactagtaacgacactaatttattaaagtatctctggtaaaaaattgcagagaaaagaaagttattttattatagttattgcccattgtttgagcgattaaatttatataagccattcaacccgttaagcttcatctgctttaattgctgcaggtactatgccaactttcccaagtgtagtgcacatgaagctccaccacttgaccgaatatttgggatgttttattttttgtattgatatgtgtaccttacattttactttcgtttgccgcataaacgccaccgaatcccaggttgtttatgtttatgaatgttgcgccacacacacgccgtcacacatatgtacatatacatatatagcctggcctgcttcgggctccaccatggtggagcagagcacccccgaagttgttcacctgttgactacttctggtattacgcagacgctgctcgatcgcatcgggagttggagttgtctgcatgggatagtcggcgccgccttgccccttcattgtcacgggtgttgtccggttt

SEQ ID NO: 42410 - DNA, 813 bp, DROSOPHILA
atggctgttagcacaacatactggaagttggccgttagtttgagtgttttcggttcgatttgcctgataacggtcacacacggggcgtatactcgcgaaattgtcaacgacaagctgccgttgcaggagaggccctcgtggctgcagacgtgcaaacgctctaatccgaacgaggacaagtgctttcggcagctcttcgagggatgctttccggcactagccgctggcattccggagatcggagtaaagagttttgagcccctaaacattgaccaggtgtcggtatccaagggcagcggcaacctggtgctatccggaggatttcaagacctggtcatccgagggccgtccaacgcgactgtgcgacgagccagcttggatctggagcggcgattgctaaatttcgagctggaacttccaaggcttaggatccgggcgaagtacaacctgaagggaaatatcctacttttgccccttgtgggcagtggagacgtggctatggcgctgaagaacgtacacacaaccgtgtacacaaggatctctctacggaacgagacacgcacgggcgacgagatcatccatatcgatgaaatgaaggttggcttcgatgtaggcgccatgagaatacacctgaagaatctattcaacggaaacgaaattctcgcggcatcgattaactcctttctgaatcaaaacggcaaggaggtgatagcagagctgcgtccagacctggaactgggactggcagacatctttcatggactgtggaacaatgtcttctccaagatgcccaccaaactgtggctggtttag

SEQ ID NO: 42411 - protein, 270 aa, DROSOPHILA
MAVSTTYWKLAVSLSVFGSICLITVTHGAYTREIVNDKLPLQERPSWLQTCKRSNPNEDKCFRQLFEGCFPALAAGIPEIGVKSFEPLNIDQVSVSKGSGNLVLSGGFQDLVIRGPSNATVRRASLDLERRLLNFELELPRLRIRAKYNLKGNILLLPLVGSGDVAMALKNVHTTVYTRISLRNETRTGDEIIHIDEMKVGFDVGAMRIHLKNLFNGNEILAASINSFLNQNGKEVIAELRPDLELGLADIFHGLWNNVFSKMPTKLWLV

SEQ ID NO: 42412 - DNA, 3704 bp, DROSOPHILA
gcagaagtagccgtagtcctgggcccgcacctcgtcgctccacacaatcatgtcgcgccggtacttctccttgtagggtccatcaccgaggagagcgtccaggtccaactgcagcttgcgagcccattccgacttaatgggctctgagattcgaacgatacacgaccgggagcccaatctggaatggaattggattttatttgtctgaatatttctgcagcaagcagtgcaaatttaacaaattggcaagatttctacgactagctatgcactgcacccacctccgctgcagcctctcggatatgtaatccttgccgcactttcgcttgccgctgatgagtacaattttcatcatttttctggcgcaactttcacttttgctcgccaacttctttcacaaccgctgcttctcctgctgcttctgcttgtggcctcgatttcctaagttctacgctgtgctcatcagatactggatgtggttgtgttcaccctgggccctgccacttgactccggcactgcggcctgttgtgtttatgctaatgctccattcgaagtctgtgctccaagtcgcatttgtttaccttttgtatttcgctggaacagcaaccagctggagcgtatcgtcatcgataggcggccaatcgagcgggctttttgaatttcattcagctcgagtggaaaccgtaccgtcatcgattggccgccaatcgggcgggatttttgaatttcgttcagcttgagaaccgcaaaggtattcataaaattgttatcctgatttgttcgccacgataaccacttcactactacattaagaattaagtttagcccaagctttaaaaccggagtagcatttattttttggttcgggttggcctaaccccgtaaaatatctttaatagtgttcagttcagcttaacatacacttgttcacttaattaaaagcctgcgtgcctgcgttaaagcgtctaccctggttactagcccctcgctttcgtccccctatctgtagtattgcgactgctgccagttgccactcgagccaccagttggcgcgtcggtggagcctccaatcagggcacctgggccaacagcggaatggctgccactcggattggcgggctgtgctgctgctgttgccccaccgccgggtggcccagaacccggattcccggccgcactgccaaaggaggcgagcacgctgctgtagtaggaggcatccgccaccgactcggactggtggggcgtgcccttcttgagcgtgtggtgcagcgaggccttgccctggtgacattcctgcgcattggcattgttgatcctggtcaaattggccagcgtgagcgtcgagtggccgccgtggatggcgttttgggcggcggcggcggatcctggtggcggtatactaccaatactaccgatgttaccgacaccgccggtcagtggcagccgcgacaggacgggacgggacgcaatggaggcggaaacggatatggggacagacgactcggagagctgcaaggggcaagcggttgtttttttatagacaggacagcttagtttaggagccatagctaccactcgccttgcgctgcttgtgcaactccaggcccagaccgacgccgcccagatccgtcatttttggctgctccgccatggctgacagctgcggctgtggctgcaacggtggcggctgcggcgccacatgtctgtgattgatgtgcgcctgcaggtcgcgttgcgaaaggtatgttctacggcagccggagctgccgtagcgactgccgccgtgcgtgcacatgaacacggtgcccaggccactctgctccacgcgcaacaccttgtccgtgcagcggggacaactcttgatgggctcggcgcgggcgcacttgaggcaaaatacatgcttgcagggtatcatgcggccgtagacgaggatcggcttgtcgcactgatcgcagcagtggatcatcgggttcagcaccttctcgccgatcaggctcaccttgtggttccacttaaggcgcagcatcggctccggcggtccgcgcgaaagcgtggtgaaagtgggcgcctccagttgcgatatgtccgcctccatgtcgactgcgcgggcgagagatagcgagatagctttgttcaatgcttcaagtttggataccaaggaattggtcaagccaagatgttaatcaatttaactatcttggacaaccattcaataggggaggagactcacttgtttggctcatcacgggcggtggcacttgctgcaggacctgtggctgttgcgtcgctggagtcatgttcccgctggcggcgaccgctcctagcgcaccgtgcggcaggggctcctccagagcgccgggcgtttccagttcgccgtccttgtcgagctcctgcatgaccgaatcttcggaggcgtccagtcttcccggactgtcctccagggctgcacagctgctggccgccagggctgcggcgtcggcgatgctgctgtcgtcgattttcttgccacgaccgcgtcctcggccacgtccgcgcccgcgagccctggtgccacgccctcgtccgcggccgcgcttcacttcctcggtgtccattgttcacttgtacttgcgtgggattttatgccggtttttaagtttttcggtttttgtttagctccgcatttgcgtttggccagggttgtcagctgttcccacatacgtgcagtaacttagggtgaccagtctgcgcctaacaacactggccatcaaaaggtccggcatcactggtcagtttaaaatacaatatttttacttgtttaattttaattttatctgtttttcaattatttttaaactaatttgaatttaatgaatgtaaaaaaaaacataaaaaaaaacaataattataagcatctatttaaccgttcttgtatcatattaatagcttactaatttcttttgtagcttcaacatgaaaaaacaaaagtattctgaatagaaaatgtgagatctacattaagataaccttaaaaacttaataataattaataacaaggtttaaaattagttttttcgtatataaatttgaatttgtaaaatgtttttttaattacaattaaatagtttttattacaagttatatttttatactatgctttaaaaaaaatgatttttggtatttgttgcctaaaaatatcgtttatcccctttccttatgctttaaattgcgctcgaatttatgcaataactgagttgagtagttcttcagctagaaatcggggtcattcaccttgggtgcaaggtagtatcgaatgtggccgtaatcctcgatgggatactccaccaggagtggccgctcgtcggacaggtagagcttgacgcgatctgccagcggagtggccttggtgaaggtgttgaggtagcgaccggcgaaggactgggtcacgggctcctgcacctcaatgctcacgtccatggcggtgcccgcactcagctgaatgttggccgtgcccagatctcccttggccaagaacctgatgcccttcgaggagcaggcgatcgtcagggactcgtcgaacatgctcatgtcccggcaaatgcgcgcgaactctgacgacggcaactggatgaagcaggtgtagtcctttttcggaatctccatgtgatcctggtccagattgaggagcttcagctcgtagtccgccgtgcgctccttgccatcc

SEQ ID NO: 42413 - DNA, 1468 bp, DROSOPHILA
cacgtatgtgggaacagctgacaaccctggccaaacgcaaatgcggagctaaacaaaaaccgaaaaacttaaaaaccggcataaaatcccacgcaagtacaagtgaacaatggacaccgaggaagtgaagcgcggccgcggacgagggcgtggcaccagggctcgcgggcgcggacgtggccgaggacgcggtcgtggcaagaaaatcgacgacagcagcatcgccgacgccgcagccctggcggccagcagctgtgcagccctggaggacagtccgggaagactggacgcctccgaagattcggtcatgcaggagctcgacaaggacggcgaactggaaacgcccggcgctctggaggagcccctgccgcacggtgcgctaggagcggtcgccgccagcgggaacatgactccagcgacgcaacagccacaggtcctgcagcaagtgccaccgcccgtgatgagccaaacaatcgacatggaggcggacatatcgcaactggaggcgcccactttcaccacgctttcgcgcggaccgccggagccgatgctgcgccttaagtggaaccacaaggtgagcctgatcggcgagaaggtgctgaacccgatgatccactgctgcgatcagtgcgacaagccgatcctcgtctacggccgcatgataccctgcaagcatgtattttgcctcaagtgcgcccgcgccgagcccatcaagagttgtccccgctgcacggacaaggtgttgcgcgtggagcagagtggcctgggcaccgtgttcatgtgcacgcacggcggcagtcgctacggcagctccggctgccgtagaacatacctttcgcaacgcgacctgcaggcgcacatcaatcacagacatgtggcgccgcagccgccaccgttgcagccacagccgcagctgtcagccatggcggagcagccaaaaatgacggatctgggcggcctctccgagtcgtctgtccccatatccgtttccgcctccattgcgtcccgtcccgtcctgtcgcggctgccactgaccggcggtgtcggtaacatcggtagtattggtagtataccgccaccaggatccgccgccgccgcccaaaacgccatccacggcggccactcgacgctcacgctggccaatttgaccaggatcaacaatgccaatgcgcaggaatgtcaccagggcaaggcctcgctgcaccacacgctcaagaagggcacgccccaccagtccgagtcggtggcggatgcctcctactacagcagcgtgctcgcctcctttggcagtgcggccgggaatccgggttctgggccacccggcggtggggcaacagcagcagcacagcccgccaatccgagtggcagccattccgctgttggcccaggtgccctgattggaggctccaccgacgcgccaactggtggctcgagtggcaactggcagcagtcgcaatactacagatag

SEQ ID NO: 42414 - protein, 452 aa, DROSOPHILA
MDTEEVKRGRGRGRGTRARGRGRGRGRGRGKKIDDSSIADAAALAASSCAALEDSPGRLDASEDSVMQELDKDGELETPGALEEPLPHGALGAVAASGNMTPATQQPQVLQQVPPPVMSQTIDMEADISQLEAPTFTTLSRGPPEPMLRLKWNHKVSLIGEKVLNPMIHCCDQCDKPILVYGRMIPCKHVFCLKCARAEPIKSCPRCTDKVLRVEQSGLGTVFMCTHGGSRYGSSGCRRTYLSQRDLQAHINHRHVAPQPPPLQPQPQLSAMAEQPKMTDLGGLSESSVPISVSASIASRPVLSRLPLTGGVGNIGSIGSIPPPGSAAAAQNAIHGGHSTLTLANLTRINNANAQECHQGKASLHHTLKKGTPHQSESVADASYYSSVLASFGSAAGNPGSGPPGGGATAAAQPANPSGSHSAVGPGALIGGSTDAPTGGSSGNWQQSQYYR

SEQ ID NO: 42415 - DNA, 3159 bp, DROSOPHILA
ctgtaagcgatgcggctctttaaagttcacttattaagttgcaagaatagcaggaaaattcaaccaaaagtgggccagtttgaaaaatatcaagaatatgccaacgatactcacctacgctctgccgggtgattatgctgcacgtggttcgacatggtccgtgctcgttatgcggaacattacaacaacaaaaaaaaaaaatttaatatatatgtaggtacgcaaaaagtgctggatttccttttcatttgttttccacacacactagacagacattcgagttgaagtcaaaatcagacaatgttccctccatatggctccatatcacattggtcgaaaaaatggcaagcttacaaatggcgcagtccccggctgcataaacgatgtcattttttggattgcccaatttttttttaggtagcttgcgaatcatttgcaagcgatttaatttcaattgcatgggcgttaatcaaaggaaacaaaagccaacacgggaaaaagaacaaagaaaacgctagtccacttattcgacaatgtaaaagaaagcagagagttactattaatgcagcaaaaaatgagcaggagcagttcaaataaaatctttccagtaattttcgattcatggaccaaaaaccgtaaacaaaaaaatcgttctattttacatagtgaaagtatgttttcatctattttttatcaatctgagcaaaactacatataaacataaattatttatataatatttatattaaattattccaaacattttattataccatttatatatcgtcatccttatcaaatcttatatctaaatgtttttttttttaatgtgtaatgtgtttttcctatttggttttttgtgtgctttgaatttaggcgcgcaacaaaatgaatagcaactgtttggtatttttatgtcagattttgtaccaactaaaaatcgttgacatctactacgtttcaacgtctggccactctgcacgaatgcaaaaacaaactgaaataattttttaataccatttttcttcttggcgcgaattggctacaaaaaaaatgaatggatcgcgtaaaataaagtccatgaagacgattcgccttggcgacgttctatacgacgaccaaaaacgacttctaacgctgtgccgcagctgcgaatgccactttatgacgctccaatcgttccaacgccacctagccgattgccccggagtaaaatacatagtaacgccgatcgaaccgctggcatttgatgatgccaatcgggaaacgagactggtgaatggcagacaggaggtaggcagctaagggagctccatgatccggcgttgccctgaaaacttcctgagaatccttttgattgaactcacttcttgcagattcacatctacgacctggaggcggttaagaagaacaccaacacggccatcgattgggaggcagagctggaggatccacgctggtacaccaatcccaagcccaccgtgcagaccataccaaagacaaattccaaggaaaatatagtaaaggaggatgtagtgccgctcgccaaggagcctcaggaaccggaaggggtgcctgcgaaacgtccgcgtagccctcccaccacccgacgtaccattctgacctcccagcagcagcgcagatcccgtgcctgcttgacttcccctcaaccgccagcagtaaagatgaaaaaggccatcattctggtgcccactgtgctggaagatctgaagcgattgcaggacacggagaaaaaggaaaggattccagaggcaccaccagctcctgtacatcctgtaaggtcattgcaatctcgtgctaccgggacaacgcagtcaacatctcaattggtacccatgaaattttctcctgcatcgaagcttattataccagtctcttcaaggatatctgaagtaccagaacctcccaagacgcccgagaaaccagttcctaccataacaagcaaatcaactcctccattggatggcacccagaaaatcctaaacaaactcagagcatgcggtgtggaggtgaagcgagcaagtacccaattgaatgccacgactgagctaaatccaaccaaaaatcaagagaccttggacatcatgagaaaactgcaatccaagggcatcagatgcaccaaagtaagaaaatcgtagttgtattcgccgtagtgtaaggatggtgccattaaatgtgcctctggaggcgaggatttagcaatataactttatttaatttaaatggagattaataaattcccggatagcgtttataactttaatagcaagcgagtctctttattatcaaatcgcttaattttaaatgttttattttggtttttttgctcaagcagtgtgaccttttgatgcgacaacgttatcgatttaatatatcgactatacactagtggtggctatttagcttataaatgtattgaactatattaaataattaaaactatatatcactcaaacaatgccgtttaaatactttgaagacggtaatcacatgttccatacaaaatgttaacagtcctagctttttttatgttgtccatttatgtagctgaaaagttggcatcactgtgtaagaagaagaagcagcttgttgatttttggtgccgcacgcgtttcggtcgaaagtaattggaaatatttgtgcttgcgcccggcgttatatatattttgtagtactcgaaacactgccgaatccaaatccaaaattcgcgtgtgcacacccacctgccgaggcggtaccaattaaaaggtaggtcagctgacgacgatggcagccaattcgggcttacataatttggggacagaatatttattttgccaccttagatttggcattcaatgcagtgaaaatgacatcattttgaaatttttagaaccgcttgtgttttgtttggtgaattttataatatttgcaatatttcggctgcagttgcatcattgacagcgaaccttaagtttagttctctgtaaaggtcaccaagcccagacttaaaaaacagatgttttttaacaatcttggtacgtcccactactaaagcacttataatttaatatacatttaatccgccagtaaaacacctataaatttgaattagaattcaattttattctcatttcaagtttcaatattatttctatt

SEQ ID NO: 42416 - DNA, 1076 bp, DROSOPHILA
aaataattttttaataccatttttcttcttggcgcgaattggctacaaaaaaaatgaatggatcgcgtaaaataaagtccatgaagacgattcgccttggcgacgttctatacgacgaccaaaaacgacttctaacgctgtgccgcagctgcgaatgccactttatgacgctccaatcgttccaacgccacctagccgattgccccggagtaaaatacatagtaacgccgatcgaaccgctggcatttgatgatgccaatcgggaaacgagactggtgaatggcagacaggagattcacatctacgacctggaggcggttaagaagaacaccaacacggccatcgattgggaggcagagctggaggatccacgctggtacaccaatcccaagcccaccgtgcagaccataccaaagacaaattccaaggaaaatatagtaaaggaggatgtagtgccgctcgccaaggagcctcaggaaccggaaggggtgcctgcgaaacgtccgcgtagccctcccaccacccgacgtaccattctgacctcccagcagcagcgcagatcccgtgcctgcttgacttcccctcaaccgccagcagtaaagatgaaaaaggccatcattctggtgcccactgtgctggaagatctgaagcgattgcaggacacggagaaaaaggaaaggattccagaggcaccaccagctcctgtacatcctgtaaggtcattgcaatctcgtgctaccgggacaacgcagtcaacatctcaattggtacccatgaaattttctcctgcatcgaagcttattataccagtctcttcaaggatatctgaagtaccagaacctcccaagacgcccgagaaaccagttcctaccataacaagcaaatcaactcctccattggatggcacccagaaaatcctaaacaaactcagagcatgcggtgtggaggtgaagcgagcaagtacccaattgaatgccacgactgagctaaatccaaccaaaaatcaagagaccttggacatcatgagaaaactgcaatccaagggcatcagatgcaccaaagtaagaaaatcgtag

SEQ ID NO: 42417 - protein, 340 aa, DROSOPHILA
MNGSRKIKSMKTIRLGDVLYDDQKRLLTLCRSCECHFMTLQSFQRHLADCPGVKYIVTPIEPLAFDDANRETRLVNGRQEIHIYDLEAVKKNTNTAIDWEAELEDPRWYTNPKPTVQTIPKTNSKENIVKEDVVPLAKEPQEPEGVPAKRPRSPPTTRRTILTSQQQRRSRACLTSPQPPAVKMKKAIILVPTVLEDLKRLQDTEKKERIPEAPPAPVHPVRSLQSRATGTTQSTSQLVPMKFSPASKLIIPVSSRISEVPEPPKTPEKPVPTITSKSTPPLDGTQKILNKLRACGVEVKRASTQLNATTELNPTKNQETLDIMRKLQSKGIRCTKVRKS

SEQ ID NO: 42418 - DNA, 2673 bp, DROSOPHILA
tgaaaatggccacgcccccgccagaacagcagccccatggtgatccccgatcgcccagcctgggcgtcgatcgcacacccatcatcttctgcgacgacgaggaggaggaggcacgcgaggcccagatgctggagcacatcctggaaacactgaccctgaatctcagcactggcagcagcatggcctcctttgtcgctggcgaggagcagctaccagaagtgccgtcgaacaaacatttggagcgagtgcgtttgggtcacaagcgtcgtgtgccaccgcgcaagcccgccagagccaacaagccaaagatctatgttgaccaagaggaggggtccccggtgaccggaggatccattacgcccaagacaaacagtacccccctgtccgcacaaaagcgaactccactcagttgcgttaagaataagccgcatctgcgatcccgttcaatggaaaaggattctaagaagaatcagattccgcccgcgcagagcttcaacgatcaactgcggataatctctggcacagagggattcagcggacccgtttactaacacagcttagtagctactattgccttatgtccatcaaaacccaccaaatcatagtcttttctcacgacacatacttttattactcatcttttaataaatcattttattagtttgcttgccagtacattgtgcacataaattgatggatgcagtttgctcatgagtattattctaacatttggaaaccgggctatttattcctgaagtaacctattaccgataatcagcgacatatagtttgtatatccattgaatctattaagtcttaaacgttgcaagttagtaaaaccgccacacaagctctatttcgttaccaagagtatttactattaggtacgtaacttcattcttgtctagtgtattgcattaactacgctatttgtgaccggaatacgtgatatatcaaaaatacatttgttcaaagcatggtgagccgagaggtccaagctctatcgatactgcagctgcagcctatccagcagaatgtcgatggcctcctggtcgagttcctcgtcgttggccaacaccacgtcgaagccgtcggccagatcatccagatcgcactcggagggaacatcgtctattcctgcggtaaaggtccatccccgtgcagaccgcgtttctggacgggatgttagacgcaaggtgatgactcgttccggcccgtaagtctcccggaaccacctgatgtcgttcttgcgccgcacatcgctgaccagaatgtagggcgtctgctggcgactcagcgcctcctccatggccacgcggcagaagtagccgtagtcctgggcccgcacctcgtcgctccacacaatcatgtcgcgccggtacttctccttgtagggtccatcaccgaggagagcgtccaggtccaactgcagcttgcgagcccattccgacttaatgggctctgagattcgaacgatacacgaccgggagcccaatctggaatggaattggattttatttgtctgaatatttctgcagcaagcagtgcaaatttaacaaattggcaagatttctacgactagctatgcactgcacccacctccgctgcagcctctcggatatgtaatccttgccgcactttcgcttgccgctgatgagtacaattttcatcatttttctggcgcaactttcacttttgctcgccaacttctttcacaaccgctgcttctcctgctgcttctgcttgtggcctcgatttcctaagttctacgctgtgctcatcagatactggatgtggttgtgttcaccctgggccctgccacttgactccggcactgcggcctgttgtgtttatgctaatgctccattcgaagtctgtgctccaagtcgcatttgtttaccttttgtatttcgctggaacagcaaccagctggagcgtatcgtcatcgataggcggccaatcgagcgggctttttgaatttcattcagctcgagtggaaaccgtaccgtcatcgattggccgccaatcgggcgggatttttgaatttcgttcagcttgagaaccgcaaaggtattcataaaattgttatcctgatttgttcgccacgataaccacttcactactacattaagaattaagtttagcccaagctttaaaaccggagtagcatttattttttggttcgggttggcctaaccccgtaaaatatctttaatagtgttcagttcagcttaacatacacttgttcacttaattaaaagcctgcgtgcctgcgttaaagcgtctaccctggttactagcccctcgctttcgtccccctatctgtagtattgcgactgctgccagttgccactcgagccaccagttggcgcgtcggtggagcctccaatcagggcacctgggccaacagcggaatggctgccactcggattggcgggctgtgctgctgctgttgccccaccgccgggtggcccagaacccggattcccggccgcactgccaaaggaggcgagcacgctgctgtagtaggaggcatccgccaccgactcggactggtggggcgtgcccttcttgagcgtgtggtgcagcgaggccttgccctggtgacattcctgcgcattggcattgttgatcctggtcaaattggccagcgtgagcgtcgagtggccgccg

SEQ ID NO: 42419 - DNA, 570 bp, DROSOPHILA
atgatgaaaattgtactcatcagcggcaagcgaaagtgcggcaaggattacatatccgagaggctgcagcggagattgggctcccggtcgtgtatcgttcgaatctcagagcccattaagtcggaatgggctcgcaagctgcagttggacctggacgctctcctcggtgatggaccctacaaggagaagtaccggcgcgacatgattgtgtggagcgacgaggtgcgggcccaggactacggctacttctgccgcgtggccatggaggaggcgctgagtcgccagcagacgccctacattctggtcagcgatgtgcggcgcaagaacgacatcaggtggttccgggagacttacgggccggaacgagtcatcaccttgcgtctaacatcccgtccagaaacgcggtctgcacggggatggacctttaccgcaggaatagacgatgttccctccgagtgcgatctggatgatctggccgacggcttcgacgtggtgttggccaacgacgaggaactcgaccaggaggccatcgacattctgctggataggctgcagctgcagtatcgatag

SEQ ID NO: 42420 - protein, 189 aa, DROSOPHILA
MMKIVLISGKRKCGKDYISERLQRRLGSRSCIVRISEPIKSEWARKLQLDLDALLGDGPYKEKYRRDMIVWSDEVRAQDYGYFCRVAMEEALSRQQTPYILVSDVRRKNDIRWFRETYGPERVITLRLTSRPETRSARGWTFTAGIDDVPSECDLDDLADGFDVVLANDEELDQEAIDILLDRLQLQYR

SEQ ID NO: 42421 - DNA, 10088 bp, DROSOPHILA
cggaaaacagtaccacgcccacaacggttatgacggagatcggatacggatacgataatcaggccatggtcgtaacgccggtttccgagaaaccctcagcagcgacgattcccgtcgctttctaaggccatacaagtacttgaaaactcttacttctaaatcagtccagcgaaagcaaaatgtgcaccacattaaaactagtgatatttttcatagttattaagcaagaagtcttctatcaatatggaatatatacgcatatctgtagaatataaaccttaattaataggtttatatatgttgggacatatttttgataacccaatgtggccctgaaaacttatattcgatctgtatgaaattatatgtaaaggaacttttttctctttactttaatattttccttaaagcaacgaaaatacttacaacatcacaactatgaacgaagagacatatttataactgttaagaaatatatttataatgttcaatttattatcatgttaagttttttatgtggaaaagttttgtaaatggtaatatgggggaaaaccaattcattcgcaatcaccacaaacgtttctcaacacacttccatccggttaaaataattacgaatgcgaaataaatcttcctgaaaattttttgagttttgaaataagacacgggaactacgcttaaaagtattgtcatttattgtaaaaagtattccacgttggcaaacacaattctaaggctaagttaagttggctttttgagtataactcttgttctcgtccttaatgctaatcgtttgtatatgacacgccagatatgtatgtgtgcttgtttccaaactataattaatgttttcgtatataaaatgcttcacttttcctaacgaatctcataaatcagccttaaacgtaagcttatatttaaataaataacctaggactaattccgatcgaattggaaacgcttgtattgatccctttattgcagaacatccttctaaaccttacacccaatactgattccgcctaagtagtggatttgttggcggggccgagggcggtgagctgaccgatccggaaatactttgtggcacagaggcatagccagcaaaatcattcgccatatcgcaggacgaactccaggcgtcgtgctccatgtgataaggattatatctctgcggcagcatcatttgctgcggatcgcactgatcgtccgtctcctcctcatcgggatcgtagtcgggatactcatgtttgtacgactccacgggtattatcttgcaatggggaatattgctgaaacccggtaacggtgttgaatttcctgtggccggcacggaatccgcctcggaacttgcgtaatggtggccatgatgatggtgcagatggtgttgcggactcacagaagtcaagtctggtggacacggtagcgccggcggctgatccttggatatatctgccttgtgctttctcagtttcctgatctttaatatcaacagcacgataagcaggcatatcaacacgataaagatggcacatcctatggctaaatagttaatggataatcctgcactgcccaaatgaaccgtctcggtttcctcaacacgacttctatactcaatcgatacggtggcctgtgccggctgaactgttttgattagcaattgataatcaaaactgtcatgatcagcttctgtttcctcgaccgattcatggggcacaaagtagacgacgccacttcgaagttctttataagagaatatattcgtggatctatcactctggccatcggttgtcagtcccgtgcttcggattatctttctgatttgcccagttgatggcattctagtgatcacaaacttggggttgaatttatttagtttcaacgacaaaggattatcgttgtccaaagaggtaataagctttattttaccacccgaggattcagcttccttcattactatatcattgatttgtattacaggttccacctccattaccacatcgacctgagcaacataattggtgcccggaacataggcactcacctggaaggagtcattcgatcggttcaggtctgtttgcatatagcttatctgtgatgtttccaactgttgttgcgtgaacctcagagttggttgatgtttgtacactataatgccaaaaagcggcgagtttgtgacgttgtaagacaacctttccatatgcacatttgtggacactccaatatgatccaatctcattggagcagtagtagctccttgctgaaccttcactggtgcttgcattgctgacggttgcagatgaatagaatctattttaatggtaaatatttcgtatgcaggatttgattgcccgtcggatacggtgaagcaaaacgtcgtggactgtggcattccaaagtggacatatataatgcgatcgttgttaatatcagcttgggtaaactgattggagaaagctaatagatcctcagggcgtccatcgtttgtgatctttctaagtacccccaaagtaggaccactcatcacatcgtatataatttcttcaggaggtgtatctgcatcttcggttagcaaatcatttctggtgatagtccgattctcaccctcaacgactgtcatttggggcaggtgggtgaccaaatggaagggttgatcgttaatggggttgatggaaacgggaattgtcaaattgcacagaaaaatgttcctgaaatgaaaacgtatcttattacaataactgtttacttaagtgaaatttaaggaagactcacccttgtgtcaggtaaaccgacatcagtatagtatcctccaaagtgtccgaatgatcgtgtatgtagtagacttttttggtaaagaaatcgcttgggtggtatctctgcatatgcttgaactcatgacccagaccaatattgccgtgtgtgggtttttggatggcttctatgaacaactcagggttatttatgccagctttcgttttcagatactccaaaatctttgagaaatccaacttaataggcaccgaaccgccttcgtctacattgagcttattaactggtagaaatctgagtaagcctcctgaggaaaccgatatctcaatgttgaatttctgattcaatagacgatcgcttctttcagcaaccacatcgaagtaaaatgaatcattggtcctgaactccatgataacagctgtgtgttcataaaatatatgcccattgtctacatcgttttgggtaaattcactgacttccttcgtgaaaccattatctataaactcattcacaatgcgacccagacttgggggaactgtaatgttatatctaatctctcgttcctcatctgaacatttaaagtgcaagtagtcacgcagaatttgttttttggttaatggaaaaacatgcagattttcattgtgctcggccagaatttcaatcggcttgatttcaatattcaacatttgggtggtggtgttaaatagcccatctgttaccacaaaggatagttcgtttctcctggagttggagtcgtgcatgaaatatatttcttcgaggtttatttgagcctgggtgaaatgttcgattttttggtgaggtgctgacttccttgccaagtagccgccgtatatgtgattcaccacaaatgtaagattctccggtggagtgtcgtagtcttgagccactgaaaagcatcataacaaaaatgaaacatttaaattttgagttaggtatacaataaattttcagcttacacaggtcagtatttttgatgacatagcgtccaccgttccacacctgcaggcccgtattggtgaccatcatgggctcctcgtcgttcacttgaaccacagcgaattccagctcgaaaggaacactctccttgttcctggccatggccaccaatgtaatgctatcggtggcattttcgctgccattgtgcacatactgtatgctaccctgttcgagttgtttttgagtgaatcttttgacctttgagtttccagccaaaacgtgaccagagctcggtgtaatggttactatgtactccaaaatctttccgcggtagtattccgaataaggctgtatatcagttggatttagttggacagtctttccctctacaaccgaaataatatttgagtgcatatatagcttttcaggtatgatcacgatctttatcatcagttgccttagccacgttatgccattggtaacatcgaacacaaagtaatctgtagactggttaactcctgcttgaatataaaacattttttctgtattcacagaagactgatcgaacaccttgcagttgtattcatcgtcgaaggacatggactgcatttccaaataaccgtgcatgggagaagatgttactaggaaggtaatgtctccgggggaaatattgggatgaaccacctaaaaaaggaaagttaagtaatgaaattataggttttctgatacgagcatatctacctctaaaacatctctggagattagtacacttgtggattcctccacgtaaagtgtgtggttttgtttcacttgcaggggttcccaatacgcagatggataaatccggaacatgacctcgccctcagctgtaatgttcttgatatgcacccgatatctgtgaatttaaaataaattcaacacaacttgtgaaacaaaattctctctatttcatacctaactttatccattgaggcaatttccgtattccaatagaccaatctctcccgttcaatatccaagtgggtaaaattactcagggatgtataatttgttgccttgtatatcgtagtaccgttctctccctcatttgctctgctcaagtacatgagaatgccatacgaggggggtttaatcacttcgtagtagatttcatccagtttcatatccaaatttgtttccaaaataaagtctttgttcttcagaacaacaaatttaccctcctgaactatggatgcattggttgccatcatggagacgaatggatcggaggcacggatctccagcaaaccattcacctcatgctcacgatcggtgactataaaagaagcagttccagaatcagcacctgtatgctggaacataatcctcctgtttgctatgtcgtcctgcgtgaagctatcgatgtagtgaccactcttgtaaaaggcaccattggtgctagacacatggatgtagtggatatctgtgtgattggtattgacatcagcatccagatactggagcactgtgggattgagggtcctgatgccgttcctgaccacatggaatacgcgctcgatggcggtgcgataaggctcattgtcgtttactagttttatgtgtacttccatattggacacaaactggagatcagtttcgtcaccggagagaatgagcaactcgaaagtgtccctcgtggattcggtatcgtcatggcaatagtatatatcatttcggaacagttgctccaatgtaaacatttccactggggtggtgagacccgtctgttcatcgtacttgcatataacaccatgttccggactcaatgaaacctgaaactgtagactttcgtagatgttgaagcgtatcccaaagtgattcttggttatgagagccctttctccctcctgcacttgcagaggctcgtggttttgataccccagcttgttaataagctcatcgggcggtctgtagttaatctccagaactcccgccacatcatcgcattcggcaacggaaacaacaaactccagatgatcactgaagctggagtagctggtgtgatgagtttgatatcggattcgccgtttctctatatcctgttgggtgaaggagtccagcttcttggccgccttccgcgagccctccacatagatgcccccgtagcgagttggcttcgttattttgtagatcacgctgcgcgcaaagcttccgatgggcgtggtctcgtaggagagtacatcgctggtcagcagaatctcccggctgccattgatcgatatctgcgagggtctggtgctcgttatgcgcaggcgcgtgaatgtgatgcggaagtcgaaagtttgcgtggtcacaaagccgaacgaggcaataaactgtgaaagtgaaatcaatgcaaatttattggctacactggttaacaaagaaagaggactgagtttaagaaacaaaaacctttttggtatttaacaaccaaatagattggataagtgattatacacgtttgttgtgttctattaatatataaatctttttttctattttttttatcacacgcttgataagacaacataccgattcatattgggcactttcaataaagatgatgtttaaattaagggccccgaaaactcacatctgtcccaaacatgcagcccagtgtacggcagcccatacggcctagctcgtgtttggtttcttttttttattccccatacacaccttgaattcgtcttgccagggaaaatcgctgctgtgcaaatagcgaatgtggccaaggagcagctggctatcgctgaaccagtccacgttcacccaggagccatcaatctgcctcagccgctggagaactccatgctgtggagccttaacgatatcgtaccgaatgtcgatgtggtcatctacagcattggtgccaatggagagattagcggtactgattggcaaagaactcttgtggatcattatgaggcccgtgttattgactaaccgaagctccaacggatgtaccgaaacaggcagataaacagtttcactcgtctcaatgccgtcggatacttgcagttgcagttcatagctaaaggattccgctgtagtggagttgtacagatacgatacttttcccacattcacttcggcctgggagaaggctgatgtggtcgcacctccaactataaaacaaccaaaggtctcctgaggactctgggtcggcagtatggtgtagatcagatttccaggctcgctgtctggatcgtcaatgttgaataaatccacgtccagtaccctttctattccctcgatcactcgcaggattttatgcgaatgcagtcttaattgcggtggatcatttatgggtgttatattggcatgtaaaaggaacctatgcttgcccaatatattctccggtatcttgtgcacatccccaaagatctgcatatccagtgtggcatgatcattgaagttctcttggccattgtgcacatacttcaatttatctgtggccaaatcaacgaggttaaatgtgcggcaaggcacaaatatggctttttcagctgagtactgcaagagttgtccatatttcggctgatgtaccacatggaaaataatggattgctcgttcagacttggataacgtcgcagatcgagtataatgtctatgaagtggggcgatagaaaggcagttccaccttctaaaagctgcatgggtgagacatagagcagctctagctctggactggtttctgtgaagatctgtgagaggaatataaatattaattaaagagcttgttactaagtttctacgagctccttatgtatgtttaaattgatatatgtatgtacatatatagttttaaggaatattttgtacataccttaaaaggtccctgaaaatcggccttgatgcagtaggactgatcgcagtagcagatgaagccgtccactccgtgctgactgcagattccgctcttaaggcagggattgtactccacgcatggatacttccacaggcagttgagggccaggctgcgggagatagtcatctcggcgaatcccagtggaagatcgttgaccaggatgtcgcgcatgcagcccttgaagctgatctcgtttatccgcagtcccttgctgatgagccggcggcgcatctcctcctgaacgccgccaaagaagacgctcttctcgagatttatgctcgccttggtctcattagcgtgagttccccgataaccgctcgtggcatcgtcgaggcttagctccgcaattgcggcgttatagcgcaagaagacccgatgccatttgccatcggatatgtgctcatttgtcatgaactgcaccagactgcctgccttgttgaaggtcaccttcaagtgctgatcctctatttcgaggagaatgaaatcatagccgccgttgaagaaaataaccccagcactggccattgtgcggaattgcaaggaaaggctgtgaaaaggtgaaagatttaatacgtaaagaggcagatttgattccctggtacccacgtttctcccatagcatacgattctttcatcatcaaggaatacgaatcgttcctcatgaagctaatgctgtcctgaatggacccttcgaactcagtgctgcaagtccaggcaactccagtactggtggtgtgactcgtgcgatccttggcgcgtttgatgatgtttatgttgttgtaaaagacctatttaaatattacaaaaattataatatatcagcattagcaattatcaatcaaaaactagttctactacttacatctgatatacagccccgaaagccgataacatcatccaagaactcggccgtaaagtcccccacgcctcccagaaatgtcccgaagtggatattgagggcggcgagatcgcctggaagctgtttgcgcattatgtatccgtccacctgcaaggtgatattattctcgaacctctgcaccgccacatcgtgccattccaaatcgttaagcttttgctttttgggcgatcgcagctgtaaccggaatcgctgtaattgcgctcatatgtaaggggactcgatcgatggctcacctgcaccacatcccgttcgattttatagctgaaactgatcagaccgctctccaggcgcagcaggcagtagtcggtccgtccggcggccaggaagaggaaggcgttctcctgcctggtgcgaaacttgacgcggatgttcgttgacatcttggcctcctgcagcggcatcgatacgtagccatcgccgaagagggaaactgtgggtggataggatagacatagacatgggtatgggcaaattgagatcgcaaaaaaaatatttttataattaaaaaaaattgcatgcataagtaagatatattgtgggttaaattcagctctttgttcaatcaacaagtgttagaaagatgtttaaaaatgttgaaattgtcttaatttatagatacttctaatacttctaaataatgttcgctttcttatgaattctggttgtggtgattaagttatgaatatcctataatatatagaagtttcacgtttcttttaaatttcttctaattatacattctttaaactgaattcaaatgacagatatggatacatttgcaactgatggaaacagatacactgaccagtgcacataatgttgcaagagctgccgccaatttgattggcaaccgcgttctattgcaatccgtatacaaatttgtccagatcggtggatcgttttagatcaggccatcagctgtcgggctgtcagtcaatgtctgtcgaggtcactcagtcagtcagtcagtcatttatcaggctatctattgagagccatcttttgtatcttgatttgcgtaattagttgtgggcttgagtcgaacgtgtctttctcgggaacattcgtatctaaaaaaaaaataaagcaaagaacctgacaaacttcgaacgttgtatgaataatttcccatttctcgtttgactttcgagtcaatcccacctcgtaaaaattgcatgattaatgattttctacattctgtcgtatgcttgtgcaataaattatttcggaaacaaacatttgtcaaaacatggaattcaactttgcgcgagactcgataaatattttaagaatttctctaaccaccctgcgggaaaatggaaaatgtttgctggccatttgtttatgtgtgttttaagctgctgctaggaacgacatattgacctaacccacatagaaatcgttggataaacatgaaacagttgcatgcgaatggcagacaagcaccagactgccggataaacaggcacaaagcgaaatgggcaacaaatggtcaactatggatgcttctttggccgtaccattttgacgccaattagcagcaatcaggc

SEQ ID NO: 42422 - DNA, 7156 bp, DROSOPHILA
ctgaatttaacccacaatatatcttacttatgcatgcaattttttttaattataaaaatattttttttgcgatctcaatttgcccatacccatgtctatgtctatcctatccacccacagtttccctcttcggcgatggctacgtatcgatgccgctgcaggaggccaagatgtcaacgaacatccgcgtcaagtttcgcaccaggcaggagaacgccttcctcttcctggccgccggacggaccgactactgcctgctgcgcctggagagcggtctgatcagtttcagctataaaatcgaacgggatgtggtgcaggtgagccatcgatcgagtccccttacatatgagcgcaattacagcgattccggttacagctgcgatcgcccaaaaagcaaaagcttaacgatttggaatggcacgatgtggcggtgcagaggttcgagaataatatcaccttgcaggtggacggatacataatgcgcaaacagcttccaggcgatctcgccgccctcaatatccacttcgggacatttctgggaggcgtgggggactttacggccgagttcttggatgatgttatcggctttcggggctgtatatcagatgtcttttacaacaacataaacatcatcaaacgcgccaaggatcgcacgagtcacaccaccagtactggagttgcctggacttgcagcactgagttcgaagggtccattcaggacagcattagcttcatgaggaacgattcgtattccttgatgatgaaagaatcgtatgctatgggagaaaccctttccttgcaattccgcacaatggccagtgctggggttattttcttcaacggcggctatgatttcattctcctcgaaatagaggatcagcacttgaaggtgaccttcaacaaggcaggcagtctggtgcagttcatgacaaatgagcacatatccgatggcaaatggcatcgggtcttcttgcgctataacgccgcaattgcggagctaagcctcgacgatgccacgagcggttatcggggaactcacgctaatgagaccaaggcgagcataaatctcgagaagagcgtcttctttggcggcgttcaggaggagatgcgccgccggctcatcagcaagggactgcggataaacgagatcagcttcaagggctgcatgcgcgacatcctggtcaacgatcttccactgggattcgccgagatgactatctcccgcagcctggccctcaactgcctgtggaagtatccatgcgtggagtacaatccctgccttaagagcggaatctgcagtcagcacggagtggacggcttcatctgctactgcgatcagtcctactgcatcaaggccgattttcagggaccttttaagatcttcacagaaaccagtccagagctagagctgctctatgtctcacccatgcagcttttagaaggtggaactgcctttctatcgccccacttcatagacattatactcgatctgcgacgttatccaagtctgaacgagcaatccattattttccatgtggtacatcagccgaaatatggacaactcttgcagtactcagctgaaaaagccatatttgtgccttgccgcacatttaacctcgttgatttggccacagataaattgaagtatgtgcacaatggccaagagaacttcaatgatcatgccacactggatatgcagatctttggggatgtgcacaagataccggagaatatattgggcaagcataggttccttttacatgccaatataacacccataaatgatccaccgcaattaagactgcattcgcataaaatcctgcgagtgatcgagggaatagaaagggtactggacgtggatttattcaacattgacgatccagacagcgagcctggaaatctgatctacaccatactgccgacccagagtcctcaggagacctttggttgttttatagttggaggtgcgaccacatcagccttctcccaggccgaagtgaatgtgggaaaagtatcgtatctgtacaactccactacagcggaatcctttagctatgaactgcaactgcaagtatccgacggcattgagacgagtgaaactgtttatctgcctgtttcggtacatccgttggagcttcggttagtcaataacacgggcctcataatgatccacaagagttctttgccaatcagtaccgctaatctctccattggcaccaatgctgtagatgaccacatcgacattcggtacgatatcgttaaggctccacagcatggagttctccagcggctgaggcagattgatggctcctgggtgaacgtggactggttcagcgatagccagctgctccttggccacattcgctatttgcacagcagcgattttccctggcaagacgaattcaagtttattgcctcgttcggctttgtgaccacgcaaactttcgacttccgcatcacattcacgcgcctgcgcataacgagcaccagaccctcgcagatatcgatcaatggcagccgggagattctgctgaccagcgatgtactctcctacgagaccacgcccatcggaagctttgcgcgcagcgtgatctacaaaataacgaagccaactcgctacgggggcatctatgtggagggctcgcggaaggcggccaagaagctggactccttcacccaacaggatatagagaaacggcgaatccgatatcaaactcatcacaccagctactccagcttcagtgatcatctggagtttgttgtttccgttgccgaatgcgatgatgtggcgggagttctggagattaactacagaccgcccgatgagcttattaacaagctggggtatcaaaaccacgagcctctgcaagtgcaggagggagaaagggctctcataaccaagaatcactttgggatacgcttcaacatctacgaaagtctacagtttcaggtttcattgagtccggaacatggtgttatatgcaagtacgatgaacagacgggtctcaccaccccagtggaaatgtttacattggagcaactgttccgaaatgatatatactattgccatgacgataccgaatccacgagggacactttcgagttgctcattctctccggtgacgaaactgatctccagtttgtgtccaatatggaagtacacataaaactagtaaacgacaatgagccttatcgcaccgccatcgagcgcgtattccatgtggtcaggaacggcatcaggaccctcaatcccacagtgctccagtatctggatgctgatgtcaataccaatcacacagatatccactacatccatgtgtctagcaccaatggtgccttttacaagagtggtcactacatcgatagcttcacgcaggacgacatagcaaacaggaggattatgttccagcatacaggtgctgattctggaactgcttcttttatagtcaccgatcgtgagcatgaggtgaatggtttgctggagatccgtgcctccgatccattcgtctccatgatggcaaccaatgcatccatagttcaggaggtgattaaacccccctcgtatggcattctcatgtacttgagcagagcaaatgagggagagaacggtactacgatatacaaggcaacaaattatacatccctgagtaattttacccacttggatattgaacgggagagattggtctattggaatacggaaattgcctcaatggataaagttagatatcgggtgcatatcaagaacattacagctgagggcgaggtcatgttccggatttatccatctgcgtattgggaacccctgcaagtgaaacaaaaccacacactttacgtggaggaatccacaagtgtactaatctccagagatgttttagaggtggttcatcccaatatttcccccggagacattaccttcctagtaacatcttctcccatgcacggttatttggaaatgcagtccatgtccttcgacgatgaatacaactgcaaggtgttcgatcagtcttctgtgaatacagaaaaaatgttttatattcaagcaggagttaaccagtctacagattactttgtgttcgatgttaccaatggcataacgtggctaaggcaactgatgataaagatcgtgatcatacctgaaaagctatatatgcactcaaatattatttcggttgtagagggaaagactgtccaactaaatccaactgatatacagccttattcggaatactaccgcggaaagattttggagtacatagtaaccattacaccgagctctggtcacgttttggctggaaactcaaaggtcaaaagattcactcaaaaacaactcgaacagggtagcatacagtatgtgcacaatggcagcgaaaatgccaccgatagcattacattggtggccatggccaggaacaaggagagtgttcctttcgagctggaattcgctgtggttcaagtgaacgacgaggagcccatgatggtcaccaatacgggcctgcaggtgtggaacggtggacgctatgtcatcaaaaatactgacctgttggctcaagactacgacactccaccggagaatcttacatttgtggtgaatcacatatacggcggctacttggcaaggaagtcagcacctcaccaaaaaatcgaacatttcacccaggctcaaataaacctcgaagaaatatatttcatgcacgactccaactccaggagaaacgaactatcctttgtggtaacagatgggctatttaacaccaccacccaaatgttgaatattgaaatcaagccgattgaaattctggccgagcacaatgaaaatctgcatgtttttccattaaccaaaaaacaaattctgcgtgactacttgcactttaaatgttcagatgaggaacgagagattagatataacattacagttcccccaagtctgggtcgcattgtgaatgagtttatagataatggtttcacgaaggaagtcagtgaatttacccaaaacgatgtagacaatgggcatatattttatgaacacacagctgttatcatggagttcaggaccaatgattcattttacttcgatgtggttgctgaaagaagcgatcgtctattgaatcagaaattcaacattgagatatcggtttcctcaggaggcttactcagatttctaccagttaataagctcaatgtagacgaaggcggttcggtgcctattaagttggatttctcaaagattttggagtatctgaaaacgaaagctggcataaataaccctgagttgttcatagaagccatccaaaaacccacacacggcaatattggtctgggtcatgagttcaagcatatgcagagataccacccaagcgatttctttaccaaaaaagtctactacatacacgatcattcggacactttggaggatactatactgatgtcggtttacctgacacaagggaacatttttctgtgcaatttgacaattcccgtttccatcaaccccattaacgatcaacccttccatttggtcacccacctgccccaaatgacagtcgttgagggtgagaatcggactatcaccagaaatgatttgctaaccgaagatgcagatacacctcctgaagaaattatatacgatgtgatgagtggtcctactttgggggtacttagaaagatcacaaacgatggacgccctgaggatctattagctttctccaatcagtttacccaagctgatattaacaacgatcgcattatatatgtccactttggaatgccacagtccacgacgttttgcttcaccgtatccgacgggcaatcaaatcctgcatacgaaatatttaccattaaaatagattctattcatctgcaaccgtcagcaatgcaagcaccagtgaaggttcagcaaggagctactactgctccaatgagattggatcatattggagtgtccacaaatgtgcatatggaaaggttgtcttacaacgtcacaaactcgccgctttttggcattatagtgtacaaacatcaaccaactctgaggttcacgcaacaacagttggaaacatcacagataagctatatgcaaacagacctgaaccgatcgaatgactccttccaggtgagtgcctatgttccgggcaccaattatgttgctcaggtcgatgtggtaatggaggtggaacctgtaatacaaatcaatgatatagtaatgaaggaagctgaatcctcgggtggtaaaataaagcttattacctctttggacaacgataatcctttgtcgttgaaactaaataaattcaaccccaagtttgtgatcactagaatgccatcaactgggcaaatcagaaagataatccgaagcacgggactgacaaccgatggccagagtgatagatccacgaatatattctcttataaagaacttcgaagtggcgtcgtctactttgtgccccatgaatcggtcgaggaaacagaagctgatcatgacagttttgattatcaattgctaatcaaaacagttcagccggcacaggccaccgtatcgattgagtatagaagtcgtgttgaggaaaccgagacggttcatttgggcagtgcaggattatccattaactatttagccataggatgtgccatctttatcgtgttgatatgcctgcttatcgtgctgttgatattaaagatcaggaaactgagaaagcacaaggcagatatatccaaggatcagccgccggcgctaccgtgtccaccagacttgacttctgtgagtccgcaacaccatctgcaccatcatcatggccaccattacgcaagttccgaggcggattccgtgccggccacaggaaattcaacaccgttaccgggtttcagcaatattccccattgcaagataatacccgtggagtcgtacaaacatgagtatcccgactacgatcccgatgaggaggagacggacgatcagtgcgatccgcagcaaatgatgctgccgcagagatataatccttatcacatggagcacgacgcctggagttcgtcctgcgatatggcgaatgattttgctggctatgcctctgtgccacaaagtatttccggatcggtcagctcaccgccctcggccccgccaacaaatccactacttaggcggaatcagtattgggtgtaa

SEQ ID NO: 42423 - protein, 2225 aa, DROSOPHILA
MRKQLPGDLAALNIHFGTFLGGVGDFTAEFLDDVIGFRGCISDVFYNNINIIKRAKDRTSHTTSTGVAWTCSTEFEGSIQDSISFMRNDSYSLMMKESYAMGETLSLQFRTMASAGVIFFNGGYDFILLEIEDQHLKVTFNKAGSLVQFMTNEHISDGKWHRVFLRYNAAIAELSLDDATSGYRGTHANETKASINLEKSVFFGGVQEEMRRRLISKGLRINEISFKGCMRDILVNDLPLGFAEMTISRSLALNCLWKYPCVEYNPCLKSGICSQHGVDGFICYCDQSYCIKADFQGPFKIFTETSPELELLYVSPMQLLEGGTAFLSPHFIDIILDLRRYPSLNEQSIIFHVVHQPKYGQLLQYSAEKAIFVPCRTFNLVDLATDKLKYVHNGQENFNDHATLDMQIFGDVHKIPENILGKHRFLLHANITPINDPPQLRLHSHKILRVIEGIERVLDVDLFNIDDPDSEPGNLIYTILPTQSPQETFGCFIVGGATTSAFSQAEVNVGKVSYLYNSTTAESFSYELQLQVSDGIETSETVYLPVSVHPLELRLVNNTGLIMIHKSSLPISTANLSIGTNAVDDHIDIRYDIVKAPQHGVLQRLRQIDGSWVNVDWFSDSQLLLGHIRYLHSSDFPWQDEFKFIASFGFVTTQTFDFRITFTRLRITSTRPSQISINGSREILLTSDVLSYETTPIGSFARSVIYKITKPTRYGGIYVEGSRKAAKKLDSFTQQDIEKRRIRYQTHHTSYSSFSDHLEFVVSVAECDDVAGVLEINYRPPDELINKLGYQNHEPLQVQEGERALITKNHFGIRFNIYESLQFQVSLSPEHGVICKYDEQTGLTTPVEMFTLEQLFRNDIYYCHDDTESTRDTFELLILSGDETDLQFVSNMEVHIKLVNDNEPYRTAIERVFHVVRNGIRTLNPTVLQYLDADVNTNHTDIHYIHVSSTNGAFYKSGHYIDSFTQDDIANRRIMFQHTGADSGTASFIVTDREHEVNGLLEIRASDPFVSMMATNASIVQEVIKPPSYGILMYLSRANEGENGTTIYKATNYTSLSNFTHLDIERERLVYWNTEIASMDKVRYRVHIKNITAEGEVMFRIYPSAYWEPLQVKQNHTLYVEESTSVLISRDVLEVVHPNISPGDITFLVTSSPMHGYLEMQSMSFDDEYNCKVFDQSSVNTEKMFYIQAGVNQSTDYFVFDVTNGITWLRQLMIKIVIIPEKLYMHSNIISVVEGKTVQLNPTDIQPYSEYYRGKILEYIVTITPSSGHVLAGNSKVKRFTQKQLEQGSIQYVHNGSENATDSITLVAMARNKESVPFELEFAVVQVNDEEPMMVTNTGLQVWNGGRYVIKNTDLLAQDYDTPPENLTFVVNHIYGGYLARKSAPHQKIEHFTQAQINLEEIYFMHDSNSRRNELSFVVTDGLFNTTTQMLNIEIKPIEILAEHNENLHVFPLTKKQILRDYLHFKCSDEEREIRYNITVPPSLGRIVNEFIDNGFTKEVSEFTQNDVDNGHIFYEHTAVIMEFRTNDSFYFDVVAERSDRLLNQKFNIEISVSSGGLLRFLPVNKLNVDEGGSVPIKLDFSKILEYLKTKAGINNPELFIEAIQKPTHGNIGLGHEFKHMQRYHPSDFFTKKVYYIHDHSDTLEDTILMSVYLTQGNIFLCNLTIPVSINPINDQPFHLVTHLPQMTVVEGENRTITRNDLLTEDADTPPEEIIYDVMSGPTLGVLRKITNDGRPEDLLAFSNQFTQADINNDRIIYVHFGMPQSTTFCFTVSDGQSNPAYEIFTIKIDSIHLQPSAMQAPVKVQQGATTAPMRLDHIGVSTNVHMERLSYNVTNSPLFGIIVYKHQPTLRFTQQQLETSQISYMQTDLNRSNDSFQVSAYVPGTNYVAQVDVVMEVEPVIQINDIVMKEAESSGGKIKLITSLDNDNPLSLKLNKFNPKFVITRMPSTGQIRKIIRSTGLTTDGQSDRSTNIFSYKELRSGVVYFVPHESVEETEADHDSFDYQLLIKTVQPAQATVSIEYRSRVEETETVHLGSAGLSINYLAIGCAIFIVLICLLIVLLILKIRKLRKHKADISKDQPPALPCPPDLTSVSPQHHLHHHHGHHYASSEADSVPATGNSTPLPGFSNIPHCKIIPVESYKHEYPDYDPDEEETDDQCDPQQMMLPQRYNPYHMEHDAWSSSCDMANDFAGYASVPQSISGSVSSPPSAPPTNPLLRRNQYWV

SEQ ID NO: 42424 - DNA, 7028 bp, DROSOPHILA
tcggtccaagtggtagtctctccagtggagccgcggcttgagttcgaatcggtaaacttggagcgccggccagagcggacgctaataaaagcggtcgtaaaacaagtttgcctaattgatcgagcgtacgccaaaaacaaaaagaaggctcggacaaagagagaccccaagcgcaaggcgttaataccatacctccttcgactcgaactcaaactggactccattcccgggctgtggggcatttttgccataccatgccataccatccgagccatgccatccgtaccgccgacagcagatcaaaggcagcggctgcgggcggtggcgttactgtgcttcggacaggcttttaagcgatgacaccaaatcgctatttagacactgctccaatgcttcggtgatccgcgcgagatctgggttcctcgtctctgggttgccccatcgcgggtctcttgcctgccaacttgttaagattttatggtctcgcgctgtggtccgtgggggtcattaaaattaatttggatcaatttggttggctgccaaattgttgacaatgaaatataacgatctccaccaaggtacctcgcatcctggtaaagccatcaaagtccgagtgccttgcgtttacaacttatttattttgtagaattaaaaagaggcttaaacatacaaaatcgtaggcttcattatgggcttgtgctgtcttgggctaaactacctctatatagagtatagcgatcctaagtggttggcacaaatcatttcaaaactatttgctgtaagcagttgactaaaaggaggaagacatttgcacagttaaatggttactcaagacccggaaaacccggcaaaatcttcctctaactgggacattggtcttggctatatagtatgactaacggctagggcttaaataaatattttggcaatttttgaaatttgggtttggttaactataggttactttagtgcgtagcttaagccataagtcaaagctagcttagttattcgatgatcgctctggcagaccagtgcgcgtgattacgctgggggtcagttcagtgttggagctgcgactgctttcgatggtgggtactctataaggtatgattattattgaggagtccgacagggtagcgaaaagtatctttaacttacggctgaactatctgacggtttatcggcaccgtgccgggcagatggggcgattgactctgtggcgttgattgctgactgtaaggagaatggctctcgccggtcacgtgatgacgggcggacatgttgagcgttccgtcgggggtgggcggcgccgtcgcattcagcgaaatggacaccacccgttgcccacccgcttgacccgtcgtcgacatgtcgtgcagctccggactggaattctgctggctattaagctggctattcagcatgctaactggcacttgggaaggatacagcggactgttggccatcaggttgactccctgcgacatgcctggttgggaattgggattagtttattgcatactgtaatccctggcaggtgtactcactcggcagcggtgctcggtgcatgggtgctcctccgttgttcttaggcttccgtttgcgcttctggatgccctccttcttcatcgacagcggtcggttcatgttgtgcagcttgtagtacagtccgcaggcattgcacaccggattgccctcgttgttgcgacgccacagggtcgtcgagttggtctgacagttggcgcaggtgaccccgttgcgccggttgttgggggcggcggcggccttgggcttcgcctgcctctgggttatacggggcgccatccgcataaaggccgggcaattgggacagaagtactcgctacccttccgcaagaacggcccatggcagttctcgcactttagctcgtggttgggcgacgatgtggacgaggcggtcaccagacttccatcgtactgccctatgctgctggcgggcggccagtgggaggtgctcatattgccgctcccgtattcatcaataacctgcggatggaagttgctctgtgcagcatgcgggagaacagttagtatgtaccgcctcaagaaccagtaacttaaattatacttacaaattgaacactctggtactccggcggggcgggagatgcccataaaggctcgatgccgttgccgccctcaaaagatatcgtctgaaaagtagccggtccagtctggcgcagcagtccagtctgatttaggccagactcggacttggccaagaattgaccggtgcccggaacactgtaaatagtgtttccctgctgaagcgttgccgcatagctattgctactgaagctggagctgggcgggaagggggcatatgcgttgcctaggtcggcgtaggtcttggactcgttggcatgcacactgccatccaccacgggtacatcgtagtacatattcgaggcggatgtctccggtccggcggtggtgaagcgtacatcctccgtaacgaagcgcacggttccaccatgcgaactggtggcaatgtgaaccgtctgggccgccgccgatgctgcagctgccgcctggtgttggtggtgttgctgctgatgctgctgctgctggtgctgctgctgctgttggtggtgatgctgcagtgcctccgcctcgctgctgatcactatggtctcgccgtagctagctccgttgggtgtgggacattgctgttgctgctgatgctggtgttgctgcagttgctgctgctgttgttgcgactcccccgtcgcctctcccttctcgagtgtttcgattttgatcgcggccacatcgtcaccgttgcagataataggataggcgaagatggtgcccggcggagctccggcagcagctcccacctgttccgtcacctctgcgttgcgtggcgccatctgcacgtagtgagtggctccgggagattggtgtgcactgcgctggtactcgatgtggctatccgaagcagatcctgagctcgcgttgctggcgtttgtgctcggttctccttcacgagcttcgtttaattcactgaaatgttgttaataacactgttaaataacaatggtaaattgtaactatcgattgccatttgcattagatgattgtgtttaaaaatgaaatttgtgaatgcttatgttcttaggaaaagaaggtctccagaggttacttacagtgtgccggctgtggtgagaatacggcgctggttgcgtggcaccaccacgtactgctcctccggttcgctgacgcccgcttggcccgtctgcaccaccacgcccaccgatgttgcggcttgctgttggtgttgttgctgctgctcctgctgctcatccagattgttggccgtctgctgggccaactgatcggcgccgttgctggactcgagtttgattttgtccagcagttgaagctgctgcttggttagagcctgatgctgttgctgttgcaattgttgctgttgctgttgctgttgctgttgctgctgctgctgctgcgttgtctgctgttccatctgcaatgagcaagcgacaagtgttgaatgccatgtttcgcccggctcgtctcaaaagtgtggctccagttccggccgttgcagtgcgaactgcccgcctcggtttccgccacaaaagtcaacaagacgcaagcccaaccaagaccgctgagacggacttcaaagacaccgcccgcgctcgactcacagctcaatttgtcgcctacaaccgtaaagtaccagaaactgagccgaacggagacgggcttggaggcgacccctctcctttctaccactcagttgctcagtgtcaacattgtcgaacacatttttcacttttattccatttcatttccaccagcagaagtatttgctcacagaaccctaaactcagagcggtgccttggtttcgttttcatttttcttgtgtattcgtggttttttttttttttttttttggtttagtttggcttttggcggaaattaaacttggccataaaatcgctttgctttccccgccatacgtcagtcgcttttgggtttatgacctcattccgttgggggtggcacttccacttccactccaaagccccatacccatccccatccccattcccatcctcgagcttgtgtcaacacattcgatcgtcactgtcacctgattcacgatgcggccaggttgaaatttaccgccagtccgctcatgacaagtgccatatagctcagaggctttcaggtggtttccacctttaccatggctataaatataccaaaaaatgtgtgtgcttatgtgtaaccatcaccaccgtcaattgaggaaatccacagcaacactaaaggaaaatttttgtggccattgaaatatattgcaaagataattgcttttaactgagatataaccatatacttgtacaggtgttttttttttccgaaaataatcaccacgctgaattgatttaatacattccataaaaatccccactctccctttatatgaaaaaactaatactttatcttccatttaatgaaaattgattcactttcgcagaactttaggttgacgtgccacaaatgattgatacattttttgcgtggacacaagccaagttcaatgatgattcagttggtgacaagccgtaaaaatgaaaaatctaacgcttaccaaggtacaaagtttaattacttatgtggaaggcatataaatgggggacgaaagagttccatggaaactgattgcattccgccggcggtgatgaccgtgccaagttttcaacgtcttggccaaagttcaaagaattccctggatggaaagggtgcgagataatgtggtgcaaacgtcacttcagacaatcgtctgcccgaaatgcagataaacccgactttgagtgtgtgtatatagtagtagtacgataggtaggcccccatgcacgtgccatgtaccgcgaaaaagttaagatactacggccgaacgatacggacaatatcttatccgggcgctatcaatgtacataatcagctgctgctgctgctgctgggactgagaggtcatggttggtatcccccaactgcccgcacccactctcagttgcggctacgtcatcaatagggacagatatatccaagaattacaaaagttgtgcaagcgatgtttgtcacccgagaatggcaatggcatgcgctatttgctcggcttagtcaagaatcgttgcgagggtgtggagtccgctgaacttatgaatgaaatctgcccagtcacacccacaaccatacacacacacacacacacgtacatttcgtactttatctatataaacaaaagatattgactatataatcgcacctcgtttcgctttcgttgagcttgggttcgtggttgagcaaatttcaaaggcagctctgaccaaacattttaaggcatttagaactgaatagaactataaaacttgaatataatgcagttgtgatgaatgctatttttgttaaaattctaaatttctcgaggaaattctttgccagttttactttttattttagacttataaaaaaatatgaacaatttcttgggtaagactgcttaaaggctaaagatgtgagagcactttcaaaatatctatataattaacaaaagaatgggaagtaaataaatgtacccatttttggatatacatttataccctttatatctgccctcgttagaagatccttcgattaattaaacttcactgcagttggctaatgaaagtgagataagactctcgactgccagctgcatttacagctctattaaagggccatcaatcgcaaccttcgccctctctcctatcagccatcatccactgtcaactggcgacgcgtgtctaataaaagtatctgcaactggaactgcaactatcgatgccgccattgagcaactgttaagggactgttcttccattggtcgaaaggacacttccggcaggataaaaagtacccccagatgagccaagggttggcattcattcacaaaaccaaccccaagcccatgaaggatacgctagagacagggataaggagcaggaccaaagcgaggtgataagattgacataaatttcacattatccgtggccagcaaaaaatgggtaaaaacagtcccttttcatgaatgaagaggagcgagcagttgaaagtcggctgcgtgtttcaaattttatttttgtcaaaggtattttgacgccaccttcgatcgcagctgaatttggacctcataaagattagccatctttccacatttaacttgctttcttgttgccccgttttcgtacccattctcgttttcttaatggtttcggttcgtttcggttcggtttttcttccaagagcagacaccaaaataagtgtcgcagtttgccgctgcatcccagatgactcattcattataaatcaatttgtcttatcttatttccctggcgctagaactgaaaaaaatccatatcgctgccgtttgcgggctaaaatcattttctggctcggtacaccgaaggatgtaaaatctatatggctattcgagctgtaaatacctttgaaagctctttatactccgttaattaataaattaatatttattcgtgccttgcgactgatctataaacttgaactatctgcttttaatgaccctatatggcctgtctatttagcttaatgaacttgtgtgagaaaacgttaaaaacttttatgatctttcaacaaagtagaaatgatagataggcttatagagatctcgtaaatgagcatcaaaaaggtatttaaatgtttttaatagagttcacgtatagttgctttaagcggtcaggttgatattctccattccgatatggattttaaacggaattggttttgaaaagaaaataccgacttggcaaacttaatatataatacccaaaaattacgctgactatttttgaataattataagtttattttacccaccttcagctgcatgtttacactcggtgagatagttttgcagaccatcaaattgaagtta

SEQ ID NO: 42425 - DNA, 2205 bp, DROSOPHILA
atgggcttgggccatggtaaaggtggaaaccacctgaaagcctctgagctatatggcacttgtcatgagcggactggcggtaaatttcaacctggccgcatcgtgaatcagatggaacagcagacaacgcagcagcagcagcagcaacagcaacagcaacagcaacagcaacaattgcaacagcaacagcatcaggctctaaccaagcagcagcttcaactgctggacaaaatcaaactcgagtccagcaacggcgccgatcagttggcccagcagacggccaacaatctggatgagcagcaggagcagcagcaacaacaccaacagcaagccgcaacatcggtgggcgtggtggtgcagacgggccaagcgggcgtcagcgaaccggaggagcagtacgtggtggtgccacgcaaccagcgccgtattctcaccacagccggcacacttgaattaaacgaagctcgtgaaggagaaccgagcacaaacgccagcaacgcgagctcaggatctgcttcggatagccacatcgagtaccagcgcagtgcacaccaatctcccggagccactcactacgtgcagatggcgccacgcaacgcagaggtgacggaacagggagaggcgacgggggagtcgcaacaacagcagcagcaactgcagcaacaccagcatcagcagcaacagcaatgtcccacacccaacggagctagctacggcgagaccatagtgatcagcagcgaggcggaggcactgcagcatcaccaccaacagcagcagcagcaccagcagcagcagcatcagcagcaacaccaccaacaccaggcggcagctgcagcatcggcggcggcccagacggttcacattgccaccagttcgcatggtggaaccgtgcgcttcgttacggaggatgtacgcttcaccaccgccggaccggagacatccgcctcgaatatgtactacgatgtacccgtggtggatggcagtgtgcatgccaacgagtccaagacctacgccgacctaggcaacgcatatgcccccttcccgcccagctccagcttcagtagcaatagctatgcggcaacgcttcagcagggaaacactatttacagtgttccgggcaccggtcaattcttggccaagtccgagtctggcctaaatcagactggactgctgcgccagactggaccggctacttttcagacgatatcttttgagggcggcaacggcatcgagcctttatgggcatctcccgccccgccggagtaccagagtgttcaatttagcaacttccatccgcaggttattgatgaatacgggagcggcaatatgagcacctcccactggccgcccgccagcagcatagggcagtacgatggaagtctggtgaccgcctcgtccacatcgtcgcccaaccacgagctaaagtgcgagaactgccatgggccgttcttgcggaagggtagcgagtacttctgtcccaattgcccggcctttatgcggatggcgccccgtataacccagaggcaggcgaagcccaaggccgccgccgcccccaacaaccggcgcaacggggtcacctgcgccaactgtcagaccaactcgacgaccctgtggcgtcgcaacaacgagggcaatccggtgtgcaatgcctgcggactgtactacaagctgcacaacatgaaccgaccgctgtcgatgaagaaggagggcatccagaagcgcaaacggaagcctaagaacaacggaggagcacccatgcaccgagcaccgctgccgagcatgtcgcagggagtcaacctgatggccaacagtccgctgtatccttcccaagtgccagttagcatgctgaatagccagcttaatagccagcagaattccagtccggagctgcacgacatgtcgacgacgggtcaagcgggtgggcaacgggtggtgtccatttcgctgaatgcgacggcgccgcccacccccgacggaacgctcaacatgtccgcccgtcatcacgtgaccggcgagagccattctccttacagtcagcaatcaacgccacagagtcaatcgccccatctgcccggcacggtgccgataaaccgtcagatagttcagccagtacccaccatcgaaagcagtcgcagctccaacactgaactgacccccagcgtaatcacgcgcactggtctgccagagcgatcatcgaataactaa

SEQ ID NO: 42426 - protein, 734 aa, DROSOPHILA
MGLGHGKGGNHLKASELYGTCHERTGGKFQPGRIVNQMEQQTTQQQQQQQQQQQQQQQLQQQQHQALTKQQLQLLDKIKLESSNGADQLAQQTANNLDEQQEQQQQHQQQAATSVGVVVQTGQAGVSEPEEQYVVVPRNQRRILTTAGTLELNEAREGEPSTNASNASSGSASDSHIEYQRSAHQSPGATHYVQMAPRNAEVTEQGEATGESQQQQQQLQQHQHQQQQQCPTPNGASYGETIVISSEAEALQHHHQQQQQHQQQQHQQQHHQHQAAAAASAAAQTVHIATSSHGGTVRFVTEDVRFTTAGPETSASNMYYDVPVVDGSVHANESKTYADLGNAYAPFPPSSSFSSNSYAATLQQGNTIYSVPGTGQFLAKSESGLNQTGLLRQTGPATFQTISFEGGNGIEPLWASPAPPEYQSVQFSNFHPQVIDEYGSGNMSTSHWPPASSIGQYDGSLVTASSTSSPNHELKCENCHGPFLRKGSEYFCPNCPAFMRMAPRITQRQAKPKAAAAPNNRRNGVTCANCQTNSTTLWRRNNEGNPVCNACGLYYKLHNMNRPLSMKKEGIQKRKRKPKNNGGAPMHRAPLPSMSQGVNLMANSPLYPSQVPVSMLNSQLNSQQNSSPELHDMSTTGQAGGQRVVSISLNATAPPTPDGTLNMSARHHVTGESHSPYSQQSTPQSQSPHLPGTVPINRQIVQPVPTIESSRSSNTELTPSVITRTGLPERSSNN

SEQ ID NO: 42427 - DNA, 13203 bp, DROSOPHILA
acaaagaaagtgttctgagccaaactattgttaaatatcattacgaatgccaaagtatgtaaatgcaaccgggcatatgtaaatattggcattggtgacatgtgcaaatgtttgtatggctgattccctgagaccctaacttgtgacttttaataccagtttcacaagttttgatctccggtattggacgcaaacttgctgatgttagtaaaaaataaggcaaaaacgaattccctttcaaggcacaagtatcggcaattcagagaagttctccagaaggtaaaagctcacacaaaaaatataacaagctgtatgccctaagattaaagtttcttcaacagaaatatgccgttctactgcctatgattgattggatattggattggatttactgaccccttcattagatggtttctcaaactaaagatatctaagagtgtgtgtgctaaaaatagatctacaacagaggccagaagtattttgaacctactttaggtacattttgactgcaaaggaaggagaagttgcagtttgattttcaaaaaatggctaacaaattctcgaaacttacgatcatatttaactatgcaaaagtgaagttaaaatatttttggcccttattgtgattagtttttaaaatgaaaaagtaatcgatctttaaaaatgtaacaaaagattgcattacttaaatgttaaaagttcttacaaaaaagcccatttccagataatagtaattattttaattatttccttttaaaaaaacatttattgttaggccaatgattttgtatatcaaaactatcactgaaaccacatattaaactatacatgatttaaatgtatttaaactacaagctacttctaagttctagagatacaatgtgagagagatttgaataaatcgataaaagttatgattttgatctgaacaatttcattgtcaagagagtacaaaacttatgtatgtatataggcattgtaatgaataggtgattatggttcactgatgcgtgcatttatccttggacttctttttacgatcttcacttgaatttgatcttcgagtaccttgaattggcatgtaaggcggcgtgggactggcactttgatctgaaacggaaatacacatcaatatatagcgatacaatttacggagggtcgttttatacatatataccgaaattgccggacttggagtacttcatgtgtggcgatacatcttggccactgtgatgcgagctgtcgtgggatccggcttctgatccataatgctcggatctgtaaaaaatatattataaagttaaggttactttaagcatttgaaaataagtatggagcgaaaggattatttgtgtttggcagcattttggaacggccaataggaagatcaatcaatgaatcaatgcatatgtaaaattagaacgagcactatagccgagttcctagactataagatacccctcactcaactaaaagaagtgcgaggatatgcaagatatgcaactatatgaaacttaaatttataactaatgacccttcgacgtaaaaaagcataggtgagtgatacagacagtcttgaatttttaaagacaggatttttagtttcagctaatcaatacaaattgacacgacatataataaagcaaaagaagaaaaaacctttgttatggacgataacatcaccttctttaacattttgaatttcccaagatctcgttgttcatacggacaaacagacggacagacaaacatggctagattgaattgactagtaatcctgatcaaaaatatatagacttttcaggatcggaaacaattccatttatctgtaacataattgttaacgaatatagcttacccttttcctttacgacacatgggtatacaactttcaactcacctggtcatggagttgttgttttgaactggttgcattgcctccgtcacgtgcaacgaaagaggccgtggacctggcctacaactgtccacgggcagtgtgtagatatcatcttcgccccttatgggcaccatgttcctttgttgcctctgcatggaactgtgattggagcccgaacccccatctctggtcaggctgccgttggtcaaaggtccgttgtggggccgctgttcacgactactgtttagcacgtctatgggattggagtaggcctccacatcgatgtcggcctgcgactgattcgcattgctggaaaggcaatccggtggcagtggtaggagtgggccgcagtgggaattggtgccacaaagcagattaccgtttccattggcagcctctgcggcttccttctgctgagtttttcgcagacgagctttctccttggccctcttggctttggccttttcctgaaaagacataaaacttgtttttgttatgtcaactctgcaactgtagaactaacggaatttttgtctgttaatgtctatgaatatcggcgaaaatatgtaacgcaaacttgaatatcgcaaaataaaagctacaaacccttgcagcaagtatacaaatataacaaggatactttatatagttgcaaaatactgaataaaatctatatattctctgcaagagtataatgaatgtccaaaagcaagcctggtctaagatagcttgagtaatgaaatgcgattaataatgaatagctccaaacatgttacattgaatttacctttctgaatcctaagtagttgtacctacaggaaaacaattttttggaattcatctaagttttgagcaccagtatggaagttaaattttgaataatgggaaaacttatgttagtttaaaagtagttaaaatttgtttcctagtatcctatctttctctgatataacaatctattatatttatcaggactagtaatatatgtgtacattttctgcttgaataagaattctatattatgtaggaagaccttaccctatcctgcagcattttggcgagttccttgtcctgtgcctcaatggccagcaagcgatccctgtgctcctggcgcacacagtccttcgactcaatggcctgcagacggcgagccagcaactaaaagaaaggccaacttggttaccaggtatccttgattcattcaaaacaaacactggtacctcatctttctgctcctgcttcatcttcttgcttatctcctgaatctcctccagcggcagcccgatctcccgcagactcgcatagtcgcacggatccacatagagctcaatatcatcggcgtgttgctgcatgtgtctctcagctgccttggccgatcccgatcccgatcccgatacagatccagatcccaatcccgatacagatcccaaaccgaaattgcccacaagttgatcgtatttctcgggtgacaatttctgaaatttcggttcggttcttaggagattttcgtgtgacggggagcgttgtttctggagtgatgttgcagctgcatcgacaacgctggccgatgttgctgtcgcgctcgtggcagcgatgttgtagtcgcgaatgctgtcagcaacatcggcgtagtccaccagctcatcgatgtcagccgggtgttcggtgtgtgtgggtgggtgctgagttatggatgaagtgctgggcatgttagttgttgcagatgtgatggcatttgttggtgcccgtgcccgacgtgccggcgatgatgattgatgttgctgctgttgcggcggctgctgtgcgtggtgaaaacgtgagtgatgttgctgctgctgctgctgtggcgatggtaacacatcactcaccaacagctgattgtgtgcctgtgcatttctactgggagtggtgcatgctgctgttgcccccggcaagtcaacaatatttggtataagcgataatcctacatagttgtctgtttgtgagaagtgttgctgctgcagctgcaacggttgctgctgctgctgctgcagctgactgtgatatctagcctgctgtgaggtgctcggctctggctgatgttgctgctgtgtcgactgtgtctgttgtgtctgctgctgctgttgcaggtgtatacttgctttggcgggacggggcggcggacgactcttgtcccgtgtgactggcggcggaacgggcggcaaattaacatagatttcctgcaatcgaatatatcactcaggcgataagatattggtaagatatacaaggtactcacctgcatttgcttggctattagctcgctttgcatcagctccttttgctgctgctcctgcagatcacgctccagtttgtcagctatttctttggccactcgcttgtcatgctcctccctgttgagatattgttctgattagttctattgaaattgcaaaaagaatgccgcgtgactttaacaattttcggcctttgaaaatcacttctgtggttcctttaacaattgttgattacaaataaggtaattaaggaactgccaaaacgaatttcaatgaaatatttgctttaaatggtcatgctgtaacttctcttcatcggccatattgcatttggccataaaatgcataaaaaaatattattttttaatgttattaacactcactgttctgtcagacgtcttctgtaggcatccactcttcgctgtgcctgctccttctccttgatttgttcgtgcagggcagttggaaagtcctctcgaaccactgcgtttctgtagcgatttcccttgtagaagtcattaactgggggtaaagattttgtgcattagcttaatgtttagccattaacttacacaggtacttactctcttgggactgaagcttataggccagagcgccatcctcacgcacgagccactccttgcacactggaatgagaaaatgatagaagaaacagttgagtaccttgaatcgccttctttatgacagtacattattacagtatctaatgacaagtgatatttaatgctgcaactatcggattaccggccaaatctctaatgaagccctgcaagatcgtaaaattcggtttgctccacttgatgccccggtaaaccgatgagtcaccttcaagatgcagtctttcgaatcggggacagacccggactcgaacaaaggaattccattgaagatgtactgcagttggagtgggaaagttttgtagaagttggggtagcattttgatcgatttaaccgccatagagcgatcattcacgttgataagcgaaagcgtggtataaacagcctcttaattgtgagcgtagaattcggattggggttcgcttggggttatttatatatgtttttgttgctttgctttttattcgaattcggtcgtgtgctcatgtgtttacactatgaaaaaatgtgtatcagatatgccattccattacattacatctttgcattcttccatagttcatttaagagctctatttccatttgatcaaaagtaaatatgttataattattattgtaataaattaaaaacaatgatgacttatatgttcatattaattttttctcagtgcacatatggtcgatctacgcaattggaaccgtctggttttgtgttcttgtctgcttttgagttgctgtcatttatcatttcatttagttagcaacctcgactctcagtcactgtctgtggaaagtggaagtgtggcagagtgggaaagttgttggccagatgcgagttaaagttgtaatttcaagtatgtctagttatcaaattgatagtttgttttcgggttgatatgaaattgatctactgatctacaatgatagcaggggaagcctttggaaaagggtgcagctcaactttttcttctgaatttatgaatttttggcattttttgtatgtttttagttacgctcataaaaaatggtaaattctttcaatgcgtgctctgcgtaccatctattttctcccttataaatacttcttaaacaaaaacattatgtcttttcaacactctttatatttgtaacaaacatgggcttaatcactttagagcctatattttccggacgtcccacatttcgctcaattagctttatccattccctgtttttccacttccatgtccatctatgtacataactttcttatctggacactccgatcaccccatggtgacactaatttaaaggttctctgacttgaaactgtcaactggcaattagttgaactctggccctagatttcaacgccatcagggcgagtgcaattagaacactccagttgaaaatgaattatggttcggactctcagggcagctaatgcatttagagcggattgcacttaattaactgcaattcgaaatgaaactgcacttgcagatataatcaatttagttgtttgatttctgactgcacataagcacctatatacccgtaagtacataactaatcggattctatatatgcacgttcatgctgctaaaaaaaaaaaacagtacacattgtgccgctgcataaacggaaatataaagtatgtagtttttttcaagctcgcgcttttcttggcccgctcggtctgctgagtggttcggcctgattgctcagctcaggttgcttaccccaccggcccccaaatcccattcccaactttgcttaccactcccccagatcgctcaacactatgcttataccctggaagagtgtggaaattcaagacagttgtttgcaatgacttcaagaagagtgtattctaaacccgatgtgtcaggaatctgaatacaatctgtctggcttggcaaaagtgtgtggttaccccttttttatattttacaaaaatagatttttgtacctcttccgaataagtgcctaaatacgtcgataaaacaatttcgaaaaactgtaaaacttttattgttattagaatatgcagtacctcattaaatcgtttcttatttccacttagaaagtttgataatgctacataaaggtagttacatgaacggctttaggcgagttttatagggtatgccaatcttcggttgaattctaaagtgagcttcagtcttgctgtttcatactttcagcatataacttacaaagtctcgaataagtgccagtatgtgtgtatatgatattctcgttgttcttacgactctgcacttttgcgttataattccccgagcaagcgcggctttttattatgcacaacgggcaacgggcaaaaatacgaaaacaaattatacagaaatacaaaaaaaaaatgtgtgtatgagaacggcacaaagaaaacctgtgctgaaattaacttactgtactccatacgctgccgttgcagtatttttcttctttaagaaagagaggaaatgaccgagtcattaaaatcgttcagcaaatatgtctaggaaaattatggccagtgccatttgaattcgccagttgctattaagtcacacgacgaatttgaaattctttcgatttcctgtcgcaacactgacagctgacttattgtggctgtccatatgggagacatacattttttacctggccccggaacgggttttggccaaaaaaaaaaaacaaaataaacacttttaacctctgctgccccaaaaattcgcaccacaatgggtggtgcaatgtgggtcagcaagagcattttattgacttgaccacaaaaaaaaaaaaaaacgatccgagaacgggttagtaagtcaagaaattcatgattcatggagcttaaggtttctgacgaattctctccacgggggtgaaagcaggtggtggggagggaaggaatttttggaagatatcatctgagtgaaggttgattaaaaactgttgataatggtattttgttttatttgaaataacagagcatcttaagaaaaatttaaatttgtttttgaagaatgagttaatagtatctaatacatatctatttattgttattttgattgaatcctacaaaacatattttactattattgataatgataataataaaactgaaacgtaaaaggcaccaggaaatgtatcagaacatagccaaattgtttatggtcactccgaatacgcccccttaaatggggcacttaattatttaggtggagcaacaattgtttagctgccgtctttgtgcaatttggccgaaactgcttgcattgcaacctttacaaatttgcctgccacattcaattaaccttgctggccagtccacttgcagttcccagtgtttttgcttggacctcttggcacttgcagggcttcgccaccttacttttggttttccccatttctccaattcattctctctgattggcaaccaagttcagatggtcgagcacgcatgaatgggccgccgatcgcgtgaagagttacacaacccgagatggtaatgaatatataaacctctgcatatgcatatattaaaaaaactataaacaagtgaggaaagccaaaattagaaagcagtttgacgggaaaatttatgagagagcccccgaacaaaatccaggaaaatatgtgtgtgcggcgtggaaaaaatgctgttgacgacgcttgacgactgcaactgcaacgactgccaactgcagcagcgaagacgcggcgccgaaagtggaaaaacctgactcaaggttgttgaacatgccactgccactggacgagaaatgcggcctgcaatgttgactatttgaatgttgcatctgacagatacagatacggcacacacatacagatacggatacacaccggcagtatatttagccagcctcacattggccttagcctggctgcatcatctcccgaattcaattcattcagttcattcaaatgaactcacatttcgggttcagtttaggttgccgctgattgattgaattgcctctcaggcactcgtgggccaagttatgcatatccaaagcagaaaggccaataattgtctatccaagtgcggtgttgtggcaacaaaataatgcccaaattagctttatttcggtttcatgctacgatacttatgaattgagccagtcaagctttcactgcttttaaaatgaggaagtttgctttttagtctgacagcttgaaactgtatgctttcagagtttgccttaaaatatttgtagttatttattttttactttgtaaacatcaataaatattttgtaaatatttattccttacatattatcagctcttagctctaaacgtatgagtcacatttctggcatgagctatgatacaagaaaaacatatacctgagactatattcagtttttcaaacatacatttaaagtaacaaatcctgaatatgtttctcgttctgaaagtggcagcaagtaatcccacagtatttttgtcactacctaaatttgtgtcttagttgcaagtgaaatattctgcatagctcaatttagttattcatactttcatttgtaaacaccagcacttggggtggactccttggtaactccattatttgggcttcttgaaaaattgttgtttgtaggccaacgcaagtcaagtcatgacaaagcgccataataaggagaggagctgagtggggcttgggcctcctttaagtgctatcgccatagaaattttaagagccaagtccaaatggatgagacctccttcctggcactcgcacatcctgtcatcgtggcctggcaagtgaatcattcctggcatgcagcgataaaaatgcaagaaagaaataaactgcattcaggcggctcgtcatgcaactgctgctgtttctcttgccgctggggctgctgctccccgatatcccctttctatcctggccccctcttcatcaagaagccccttcacttgtcagtcagtcgggctggttggcaaaaaaaaaaagggaaaaaagaggccagcagttgagtaagtttcagtcggaggcacggctatttccaaccaagggccgactctttgtgggggtcttttgtcatgcgtgcttgggcgcaaatgaagcggctgcaatcccctcggctaaccgtcagctgttgcctgctgcacgcgctgcatctttaagatacaaatgctgggaaacagcctttttgcatttctgcactgtgcgaaaaacttatcgaattcggtggtctatggttcttcaaatagccacagttttttgaaaacaattagcaaacatatttttaatataaaccttatttaatacatttctgagttcaacgagattttctttacacataaagaataaaatcttttctgaaaatattattattattaatcaagctggaattttatcttcaagtattacttattttttcctaccctatttgcgcttctattgtaatcattattttacaatatatataattagactagtataatgtgtatatacttttataaaacaaaatctttataatggtagataactgatttttcttcaggtgcattcattaaatggaaagtgctagcggcaatcattttttgcacctccaaaaagaagaaaatgagtatgtattttccctttctgtagcggggatcgctcggcttcccctcaattgctctaaaagaaaactatataagagctcggtgtttgtttatttttcaactgaaatctcttcttcacagctttgtccgctttcggtcgttggtctgcgctatgcggtttcttcggctgctgactggaagtctttgtttttgtttatcgtctcatgaagactttcaaaaccccccaaaaaatgaggaaactcgccaacttcttgtgattgttactgggagtggagaaagttttattcggctcgcgttttctgtgtattattttttcttctttgggcaatctgtttcattagcataacaacaaatattgttcacatagtagccaaaaaagagatttgcacaacagccaaatctttgtcatcgagcatttcgtattcgctttcaattaattgagcttattcaaagaggtgaataagctagcttttcatgttgtaacattttttctatgcaaatgttttgattattacataaggtcaagtagaatgcgataagggaaaacgtgctcgatatggcttgtttacatctgaatcaacagaaaaaaacttatatttaagccccaaggcgcaaacgacagtggagaagttctgagaacttgagtgtttgttttttttttttggctgatgtcggcattcaaagatatcggatcggtggaattaatgggatatgtatattggaatggggtatgaaaagcgttagaacatttataattcgtgatgtcttgaaagaaatgccaaattgaataaaatgtgtggactaaaaccttttatatttgcatatattagacaaaaatatttgtttaatttccaaatttgatttatattcaattttgcaagaagggtaaagacaatatatatttaatgaactttttgtgaagaattctcaacgaaacaatgggcctgactttctttatgaataaatggaaacaataaatgacaacaaatacaacaaatttgttaaaaattaatttgatcgctagagaggtcatatcgttaaagaaataccaagtcaggggaagaaaacgttgaagaggaattttaaaagacctcaaattaatcacttctatgtggtgctcatgccccccccgccccaattccaaagccccttcatctcaatagctacactcaaacccaatcaatttccaattatccaaggccccgtacgaaattgttcatgttcaaccaatttcgaaatggtttgcttcggttcggttcttaacccatgcttaccctcattaacatgtcctgatcggggcagcgcttcctttggtggtgcggctgctgttgtggttgtgaaattattcatctctctcctcctctcgccacccttctctttctaacaggctctggctgtctctttcggtggctcaaatctctatagaatatctgtatctcgttctaaaacaggtgtttaaattgggtagctcaaggacgcgccttccactccactgatttttaatttatgttggtttacttgttgaagcgggctggcaaaatagatacatagatgcggcgatacagagcgtgagtaaactatattttcatctaattgcgtcgctctcggtgcaactatttcactttcacacttccacacgagatataatgcttataattccacaatttccaccatcaacacgcgcgcaacaacgacagctgcaattcaaaattcgatttgatttaggtattgtatcccaaagatacgcaacgaaccggcggccgtcgttccacgaaagcagcaaaacagctcattcaacagcgaaagccgctcagcgaatggatgttgtttgacttggccatacagtccagctaactggaagacacaataatactgcaagcggcgctggaactggaagccgatacaaatgtatctcgaaagcggcactgcaatggaagagagaataagagagaggagagagaataactcaaaacagtgctgccaagtttcaaaaagatttcaaatctaaatacaaaaagttataattttactattgatttataaattcattaaacggtatatatgtacatatggttttttattattatttaattttccaaaatgagttgggagcaacgaatttcagtatttcttttatttatgtatatggcatttgctgtttagtaaagacatacaccattgcgttagctaagcgaggtttcaatcctcaacaaatgctacacttaaaaaattccaaaatcatatttaattagataaaaattgtgtagctagaaacttgtttataaatatcacgactgctagttagttgtgaaagtaaggtattataattaaaatttaaataataggtaatgttgtaaaaaaaactttaaacgtatagttcatattgggatactgggaatttcaataaaagttatcttaaacatattgtcgtttattcatataaaactttattattattttaattgataacttgggtaataaagtgagtgagcaagtagtctctataaaatacttcttgaggcactaccttctcgttgttatttatttttataagtcaaatcgcagccgaaatttaagaaactgaagccgggttcaaagtatgccgaagtcgggagtatttcactcatagcgcaaaataaacagtcgatcgcagacacacaaatacttgtattacttgccacagcatagatatacagatacttttgcatctacaatcgacgtgaaaaaggtaaacaaaagtcaagtcacggtgcgaatgagtgtgtatttgagatagatgcctcggtgcgagtgctgagttgt

SEQ ID NO: 42428 - DNA, 2645 bp, DROSOPHILA
cgctgttgaatgagctgttttgctgctttcgtggaacgacggccgccggttcgttgcgtatctttgggatacaatacctaaatcaaatcgaattttgaattgcagctgtcgttgttgcgcgcgtgttgatggtggaaattgtggaattataagcattatatctcgtgtggaagtgtgaaagtgaaatagttgcaccgagagcgacgcaattagatgaaaatatagtttactcacgctctgtatcgccgcatctatgtatctattttgccagcccgcttcaacaagtaaaccaacataaattaaaaatcagtggagtggaaggcgcgtccttgagctacccaatttaaacacctgttttagaacgagatacagatattctatagagatttgagccaccgaaagagacagccagagcctgttagaaagagaagggtggcgagaggaggagagagatgaataatttcacaaccacaacagcagccgcaccaccaaaggaagcgctgccccgatcaggacatgttaatgaggtgtgcaaggagtggctcgtgcgtgaggatggcgctctggcctataagcttcagtcccaagagattaatgacttctacaagggaaatcgctacagaaacgcagtggttcgagaggactttccaactgccctgcacgaacaaatcaaggagaaggagcaggcacagcgaagagtggatgcctacagaagacgtctgacagaacaggaggagcatgacaagcgagtggccaaagaaatagctgacaaactggagcgtgatctgcaggagcagcagcaaaaggagctgatgcaaagcgagctaatagccaagcaaatgcaggaaatctatgttaatttgccgcccgttccgccgccagtcacacgggacaagagtcgtccgccgccccgtcccgccaaagcaagtatacacctgcaacagcagcagcagacacaacagacacagtcgacacagcagcaacatcagccagagccgagcacctcacagcaggctagatatcacagtcagctgcagcagcagcagcagcaaccgttgcagctgcagcagcaacacttctcacaaacagacaactatgtaggattatcgcttataccaaatattgttgacttgccgggggcaacagcagcatgcaccactcccagtagaaatgcacaggcacacaatcagctgttggtgagtgatgtgttaccatcgccacagcagcagcagcagcaacatcactcacgttttcaccacgcacagcagccgccgcaacagcagcaacatcaatcatcatcgccggcacgtcgggcacgggcaccaacaaatgccatcacatctgcaacaactaacatgcccagcacttcatccataactcagcacccacccacacacaccgaacacccggctgacatcgatgagctggtggactacgccgatgttgctgacagcattcgcgactacaacatcgctgccacgagcgcgacagcaacatcggccagcgttgtcgatgcagctgcaacatcactccagaaacaacgctccccgtcacacgaaaatctcctaagaaccgaaccgaaatttcagaaattgtcacccgagaaatacgatcaacttgtgggcaatttcggtttgggatctgtatcgggattgggatctggatctgtatcgggatcgggatcgggatcggccaaggcagctgagagacacatgcagcaacacgccgatgatattgagctctatgtggatccgtgcgactatgcgagtctgcgggagatcgggctgccgctggaggagattcaggagataagcaagaagatgaagcaggagcagaaagatgaggtaccattgctggctcgccgtctgcaggccattgagtcgaaggactgtgtgcgccaggagcacagggatcgcttgctggccattgaggcacaggacaaggaactcgccaaaatgctgcaggatagggaaaaggccaaagccaagagggccaaggagaaagctcgtctgcgaaaaactcagcagaaggaagccgcagaggctgccaatggaaacggtaatctgctttgtggcaccaattcccactgcggcccactcctaccactgccaccggattgcctttccagcaatgcgaatcagtcgcaggccgacatcgatgtggaggcctactccaatcccatagacgtgctaaacagtagtcgtgaacagcggccccacaacggacctttgaccaacggcagcctgaccagagatgggggttcgggctccaatcacagttccatgcagaggcaacaaaggaacatggtgcccataaggggcgaagatgatatctacacactgcccgtggacagttgtaggccaggtccacggcctctttcgttgcacgtgacggaggcaatgcaaccagttcaaaacaacaactccatgaccagatccgagcattatggatcagaagccggatcccacgacagctcgcatcacagtggccaagatgtatcgccacacatgaagtactccaagtccggcaatttcgatcaaagtgccagtcccacgccgccttacatgccaattcaaggtactcgaagatcaaattcaagtgaagatcgtaaaaagaagtccaaggataaatgcacgcatcagtga

SEQ ID NO: 42429 - protein, 730 aa, DROSOPHILA
MNNFTTTTAAAPPKEALPRSGHVNEVCKEWLVREDGALAYKLQSQEINDFYKGNRYRNAVVREDFPTALHEQIKEKEQAQRRVDAYRRRLTEQEEHDKRVAKEIADKLERDLQEQQQKELMQSELIAKQMQEIYVNLPPVPPPVTRDKSRPPPRPAKASIHLQQQQQTQQTQSTQQQHQPEPSTSQQARYHSQLQQQQQQPLQLQQQHFSQTDNYVGLSLIPNIVDLPGATAACTTPSRNAQAHNQLLVSDVLPSPQQQQQQHHSRFHHAQQPPQQQQHQSSSPARRARAPTNAITSATTNMPSTSSITQHPPTHTEHPADIDELVDYADVADSIRDYNIAATSATATSASVVDAAATSLQKQRSPSHENLLRTEPKFQKLSPEKYDQLVGNFGLGSVSGLGSGSVSGSGSGSAKAAERHMQQHADDIELYVDPCDYASLREIGLPLEEIQEISKKMKQEQKDEVPLLARRLQAIESKDCVRQEHRDRLLAIEAQDKELAKMLQDREKAKAKRAKEKARLRKTQQKEAAEAANGNGNLLCGTNSHCGPLLPLPPDCLSSNANQSQADIDVEAYSNPIDVLNSSREQRPHNGPLTNGSLTRDGGSGSNHSSMQRQQRNMVPIRGEDDIYTLPVDSCRPGPRPLSLHVTEAMQPVQNNNSMTRSEHYGSEAGSHDSSHHSGQDVSPHMKYSKSGNFDQSASPTPPYMPIQGTRRSNSSEDRKKKSKDKCTHQ

SEQ ID NO: 42430 - DNA, 8055 bp, DROSOPHILA
cctgctgagctcagcgaattccagagccagtcccagtcgaagtgcgataccatctttacctcattgaaggcgctagttgaaacagtgctatttcccccagcaacatccaaaactctcttcggctccccccacttacacacgcacactcgctgacagtctgggatccacacagacgctgtatacagtgtacgtgtgcataacgcgccacaagagagccgcaccaactgccatcaacataacatcaaccaccaccaccatcaatctgagtgcttgtgcaacatgcgcatgtccgcgctctcttccaagtcacacggacggggaggcacacacacacacacacacacacacacacacacacacactggagcgggctggcgccgctgcgcttagagtttgtgttcgtgtgctggttctggttctggtcttggtcttgtgttgtcggtgtgccgtgccagcgatgtggatatgttgtcgccgtgcgcgttgctgccgtcagtgtagatttgtgcttcgctctgttcggttggaaggcgcgcgggcgtccagcagcaacaacagcaactacaacaacagccgaggcaagcggccctgcaacttcgtcgaggactgggacttgaacgatttcgtactcgccgtccattcacattcacattcgactgggagtgtttcgttcgaacggttcgaaaaatacaagttgaacattttcgaaaaatttaactgaaagaagaaacgtttttggagtcgtataaaaaattaaatcaaaaaacaaaaaacacaatcaaaacatcgtgtcgccggcgttgtgaggagaaataataacatttttgttaactgttgcaaacattgcctttaattgtttgttttggtcgtaaaatcaaattttatgaccagcaacataaaaagcgaacgccagcagcagcaacaacaacgactgcaggccccacaaataataaactatttatgataattataaaagagagaagaaaatcaaaaacaaacgccaaccgaaaaaaaaagaaaagtgaaaagaaaacattaactgacaaaggaaaaattggaaaagttttggaaaattggattgaccgaatgaaaactgaaaaaagccaatttgaaaatactgcgtgagttgctgacgaccgcaagcaccctgtgaaattcaagctgattcgatcccctgtgcaacaacaaagttactctcttcgcccgctctttaggcagtgtgcgtgtgtgagtaagtcggcgtgtgcgtgtgaccgctgacggacgtttgtgtgcgtgtgcggtacgcaaataaaaggggcaaaactcgagtaaaggtgctctgaatattaaaaataaaaattattaagtcgcgaaaaaaatataaagagacttaaacaattagaaaggcgtcactcagaggagtgagaaaaaaaagacagagaaaggtcggtgggtcgaggcgatcgaccccactgcaccgcctttatcctcgccgccgcagttcgagtgcaacgcgtccaagataaccgtaaatattccacccctcccccaaaccccaaccatcccgctggcgtgcgctctctacgacccccacgatgtctcggcagtcgggtcgcacgccgctgccggggcgtggtgggggcatcacacacacacccacacccacgtacccaccgccccgcacccgcatccgcatccccaggcgcatccctccctgcccgtcatgcagcagcaccatctgcagcagcagcaacagcagcagcagcagcaggagcagcagcatctgcaggagcagcagcagcatctgcagcaactgcatcaccatgcgcaccaccacctgcctcagcctctccacaccaccagccatcaccacagcgcgcatccccacctgcagcagcagcaacagcagcagcaacatgcagtcgtcgcctcctcaccctcctcggtgctccagcagcagcaacagcagtcaactcccaccacacattccacgcccacgcatgcggttatgtacgaggatcctccgcctgtgccacttgtcgccgtacagcagcaacacctccccgctccgcagcagcagcagcaacttcaacagcagcagcaacagcagcaacaacagctggcgacaacaccggtggccggcgccctcagtcctgcccaaacacccactggaccctccgcccaacaacagcaacatctcacatcgccccaccaccagcaactgccgcagcaacaaaccccgaacagtgtcgccagcggcgcctcctcgaatctccagcagcagcagcaacagcagaatgctgcagttgctcctggccagacgcagatcgttgcgccgaccacggcgagtgtttctccctccagtgttagttctcagaaggaaggtgaggtcccagaaatataactttccttggggttgaaaaccagcggatttcttattggaactccattggttatgggctttcaaagatcgttgggaaatatattttttgaaattttctacatctgaactggaaaactctcgaaataaattggggacgttaaattgggaacggggtcgttccacttgtttttttttccccccagttgcaataacgtttcagttgtgctgattgcagcacgtttttcaaggctgataaggcttttctttaactctcccaggaatcgtcacgcatttaatttatttactcaaaatatttgcgtctgttttatcattatagactatataattgcagggtggtaacaactttaattttgtaaggaaattaaaaatttttaaaaatattgtttgtgagtgtactgaagttcttcaaaactgcattggtttttttttaaagagtttacacaaaaaaaaaaattaaacgatgatttgaaacgtaatcgttatggtaaccattttattaccttaagtgttgacacgtgttaaatatacagatttatatatagacgaggtgtgaatgcacccacatccatgacatcgacaaacaatctaagggttataggcacaaatgccacgccaagtgataaaatgccaaatgatcaaggaggtcgatttgatcatagacagtcgttaaaattagacttaccagccctagtgccaatattaacagcagcaaatctgcgcttatcgtttactttcagacatcaatatgtccatacaattagcgccactgcatatacccgccatccgggccggtccgggattcgagacggacacctcggcggcggtcaagcggcacacggcacactgggcctacaacgacgagggattcaatcagcattacggctccgggtactacgaccgcaagcacatgttcgcctatccttacccagaaacgcagtttccggttggtgtaagtatggccacagcgccacccacgcctccacatcagttgtaagcaacttcgttccaacccgacctcatttctcccccgcagcagtactggggccccaactaccgccccgatcagaccacctctgccgcagcggcggcggcctacatgaacgaagcggagcgccacgtgagcgccgccgcccgacagtccgtcgagggcacatcgacgtccagctatgagccgcccacctactcctcgccaggcggcctgcgcggctatcccagcgagaactactccagctcaggtgagtccagaccggccagagtcggcacacttaagggtaacgaggttaggcacactggaaataattttgagcatcttgcaactctagtttgggaggagaaattttaaagattaaaaattaaaaatttactgtttacaattcttaaaatttttaataaaatatttggttattcatatgaaattaaattaaagtgaaaaattatacgaattcaaaattctgtttaaaaagaggcgttcaaattccacctaaatgtttttaattgtaaaatatatatttatagaccgtcaaattttccaatgaatcgataattatttggaagtgttttttatatggtgctattattttttttcctaaaagccaagccaattatttaaacagccctaaaatattaagcatcctacaatataaagttcaagattatttgattttcctatgtgcactagacttttcgtcgtcgtatcggttgaaatagcaaattgcgaaaccgtcaagtttgtcgttcaattagcgtagtgcaaaacggcccataaatcgatactcgctatttggctagcgttacgcctttatgtgggtgcgaaagtcattggggtttgcattctatggggttgcctgtttatgttcgtgtcttatcaccaggtgtttttcaactgccagaattgtatctgtcgactagtcatattttcccagtagtatccatggtatccatagtaaagactcgttattatggcggaatatgtcagttaagtgacctcgccagccaattttacaattggaattcaggtctcttaggctcgataattaatttccaatctgacctaactgtcctaactgttcaatgctaccaagactaatcgaagaaatcagattagattcgaaaagctcttcactcgtgctgaactagcgtttaaattaaaataaatccaacttgtcactttatttcaacattaatttaattgcttcatttggtcggccaatgagcgggaacgaatgtattcatttagtgttatccactcgagtgtgaatatgggcctcatgccaattcggagctccgctccccgtaccgcaccaattaagaggccataaatgaggaattgaataatttcgtattacgcttattgctaaacaatttccgtaattgctctataaacttaacgatctgatattgcaccgaacaccgagcaacaaaaccatcggaccacccgcacttgcggtttaatgaagttaaccatgtagtttaaccccattacttgatgatgttttcaggagcctctggtggattatccgtgggagcagtgggtccttgcacgcccaatcccggactgcacgagtggaccggtcaggtgtccgtccggaaaaagcgcaagccgtactcgaagttccagaccctggagctggagaaggagtttcttttcaatgcgtatgtttccaagcaaaagcgctgggaattggccagaaatttgcagctgaccgagcgacaggtgagtccataaacctactgacttgaactgaattcattaaacaggcgttcctttcaggtcaagatatggttccagaatcggcgcatgaagaacaagaagaactcacagcgccaggccaatcagcagaacaacaacaacaattcgagcagcaaccacaaccacgcgcaggcgacccagcagcaccacagcggccaccacctgaaccttagcctgaacatgggtcaccatgccgccaagatgcaccagtgacccttggacaacagcagcgctggcgccatgggctttgccacctactagcagttagccaatccgagttcgggtaaccccagctcgaatcccaaccccatgtccgatccgaatcaccatcatctaatcaagaacgagctggccatggactttccatgctagtccagcgattggaagggcgattccagccaggccgagttcagtcggttaaatgtacaaaaaccagagatctctagcatgcgggataggaatatgtgaccacaatgaggagcaaggatgtggatgagcaactgcccagaagtgcgcaggcgtcgctgatgtgtgaccaaccgacgttgatgcaaatgcagtttattattaagtcagttctacggatcccagagatccaagccccaacacgataatgcagcttagttcggtagttgaatatagatacgagtaagatgaagagtaagcagcagcagtagcagatgcacttgaaattcgcaactgtacgaaaatatatgtatgtacgtatttctctcaacgctctcattagcctaggcgagcactatgaattttccgaactataaattatgaatatgaatatacttaaacgtcagtgaatataaccccgcataaattatgaatacacgcgttcgagtagtagattttaccatacctatccaattaagagcggccacaaggcggctgagttaggctgagcagcagaacacattttagacccagataaatgttcttgaaacacaaattgaaattgtttaacaattttcggacccctcacagctccgcaaacaagaagacacactccgcagtctaggataaattttgtcgtataatgttcgtcgtgtcgtgtcctttgataccttctaagttcctgtatataaactaagacattgcgctgatttccggccgaagcgagcactcgataactaaattacatcagatatatgtatatgtatattgcgtacacgcagagatattcaatatttgtataatatgaactcggattcgattttagcaaatggttaattgtaagttgcaaaaatttcaatgagtgtgtgcatgtttaccccatagttgaagtcgctttcgaattaaattaactcttaaaccaaggaaaacacttaacaaaactactcgtaaagctaaagcaacaaaaacttaaaagatacacacttaacagaagtaagcgagtgtgaaaacgatggaggggagatgtcggggaggagtaattagcataccgtaacagctacttatataacatacacatagtacatatagtaatcgtacatatgcatacatatattttcatgtgtatcgacgccgcttgatcctgatattaagtctaagtttagttgtgttgtgtaattatcgattttgttaatgttttgccccgagcattatattatattatgctaacctatacctatacctacacctacacctatgcctatcattatatgtgtataattagcctatacatacttgatgaagaaatgatttcacccactgctttattcatgttcttgtattattattatttcgagccctcgataagttgtagtctaaagtcggttatgtttatgattatgttcgattatagtttgtttagtgaattttaatctagcgttagcaattctcttttttaaaaagttaattattgtgaataaaatacaacaagttgcagaagtgcaaaaatatacacacaattcaaaatatcccaattacttcgcattactccgcattccgtacaacaccattttcgatatcctttggatatcctccacaactgttctattttttcattcattatttcggtaagtacaccaaagaggaggatgctaccacatcgcaagcgacctctcaccatcgaatttattcatagacatccagatactcgtactcgtacaaaacgtaaagcaaaatacgtatgtactgcacttactcgtaggggatcagctcgtaatcgccacttcctcagacaaaatataaaaatctgatacagaacagaactttctgaattatttcatttcgatctttgtttccttttattgcgtttcctgatttttgttacagtatttttacacggatattgtaatacagcgcttaaataaattaaaactagaattaatagtcttgtttcggcatatgtcttaagaataaataaattattatgtaactgtgtttttctggactttacttaatgccaaagagctataactgcgcttctctgcaatggtcaattggtaggtaattttatggggcataaagtgtgatctttataaatgattgatagaatggcatggcactattgcaatttcggttatttcccccaaccattgtattaattgcattcatttaaattaatgacaatgcgcgttggaaaaccaggcttggtgaactttcgaaaattggaaaagatttgttgctcagttaatgagcatcgtatatcactttcagacaaattaatagagcttttatgttaagaacgtgtagttgggggaaagctttatatcattttaaaatgagctgcaaagcctacttataatctgcttaacatctaaaaaaaaatttatttatatatttttttttagaaaaactttttaaactgaagcaattgcttattttttgaaaatcaatatttgtaaatatttgtataagtagagtccattaaaatttaaatgtttagaatggtatactttttatg

SEQ ID NO: 42431 - DNA, 3894 bp, DROSOPHILA
ccaaccgaaaaaaaaagaaaagtgaaaagaaaacattaactgacaaaggaaaaattggaaaagttttggaaaattggattgaccgaatgaaaactgaaaaaagccaatttgaaaatactgcgtgagttgctgacgaccgcaagcaccctgtgaaattcaagctgattcgatcccctgtgcaacaacaaagttactctcttcgcccgctctttaggcagtgtgcgtgtgtgagtaagtcggcgtgtgcgtgtgaccgctgacggacgtttgtgtgcgtgtgcggtacgcaaataaaaggggcaaaactcgagtaaaggtgctctgaatattaaaaataaaaattattaagtcgcgaaaaaaatataaagagacttaaacaattagaaaggcgtcactcagaggagtgagaaaaaaaagacagagaaaggtcggtgggtcgaggcgatcgaccccactgcaccgcctttatcctcgccgccgcagttcgagtgcaacgcgtccaagataaccgtaaatattccacccctcccccaaaccccaaccatcccgctggcgtgcgctctctacgacccccacgatgtctcggcagtcgggtcgcacgccgctgccggggcgtggtgggggcatcacacacacacccacacccacgtacccaccgccccgcacccgcatccgcatccccaggcgcatccctccctgcccgtcatgcagcagcaccatctgcagcagcagcaacagcagcagcagcagcaggagcagcagcatctgcaggagcagcagcagcatctgcagcaactgcatcaccatgcgcaccaccacctgcctcagcctctccacaccaccagccatcaccacagcgcgcatccccacctgcagcagcagcaacagcagcagcaacatgcagtcgtcgcctcctcaccctcctcggtgctccagcagcagcaacagcagtcaactcccaccacacattccacgcccacgcatgcggttatgtacgaggatcctccgcctgtgccacttgtcgccgtacagcagcaacacctccccgctccgcagcagcagcagcaacttcaacagcagcagcaacagcagcaacaacagctggcgacaacaccggtggccggcgccctcagtcctgcccaaacacccactggaccctccgcccaacaacagcaacatctcacatcgccccaccaccagcaactgccgcagcaacaaaccccgaacagtgtcgccagcggcgcctcctcgaatctccagcagcagcagcaacagcagaatgctgcagttgctcctggccagacgcagatcgttgcgccgaccacggcgagtgtttctccctccagtgttagttctcagaaggaagacatcaatatgtccatacaattagcgccactgcatatacccgccatccgggccggtccgggattcgagacggacacctcggcggcggtcaagcggcacacggcacactgggcctacaacgacgagggattcaatcagcattacggctccgggtactacgaccgcaagcacatgttcgcctatccttacccagaaacgcagtttccggttggtcagtactggggccccaactaccgccccgatcagaccacctctgccgcagcggcggcggcctacatgaacgaagcggagcgccacgtgagcgccgccgcccgacagtccgtcgagggcacatcgacgtccagctatgagccgcccacctactcctcgccaggcggcctgcgcggctatcccagcgagaactactccagctcaggagcctctggtggattatccgtgggagcagtgggtccttgcacgcccaatcccggactgcacgagtggaccggtcaggtgtccgtccggaaaaagcgcaagccgtactcgaagttccagaccctggagctggagaaggagtttcttttcaatgcgtatgtttccaagcaaaagcgctgggaattggccagaaatttgcagctgaccgagcgacaggtcaagatatggttccagaatcggcgcatgaagaacaagaagaactcacagcgccaggccaatcagcagaacaacaacaacaattcgagcagcaaccacaaccacgcgcaggcgacccagcagcaccacagcggccaccacctgaaccttagcctgaacatgggtcaccatgccgccaagatgcaccagtgacccttggacaacagcagcgctggcgccatgggctttgccacctactagcagttagccaatccgagttcgggtaaccccagctcgaatcccaaccccatgtccgatccgaatcaccatcatctaatcaagaacgagctggccatggactttccatgctagtccagcgattggaagggcgattccagccaggccgagttcagtcggttaaatgtacaaaaaccagagatctctagcatgcgggataggaatatgtgaccacaatgaggagcaaggatgtggatgagcaactgcccagaagtgcgcaggcgtcgctgatgtgtgaccaaccgacgttgatgcaaatgcagtttattattaagtcagttctacggatcccagagatccaagccccaacacgataatgcagcttagttcggtagttgaatatagatacgagtaagatgaagagtaagcagcagcagtagcagatgcacttgaaattcgcaactgtacgaaaatatatgtatgtacgtatttctctcaacgctctcattagcctaggcgagcactatgaattttccgaactataaattatgaatatgaatatacttaaacgtcagtgaatataaccccgcataaattatgaatacacgcgttcgagtagtagattttaccatacctatccaattaagagcggccacaaggcggctgagttaggctgagcagcagaacacattttagacccagataaatgttcttgaaacacaaattgaaattgtttaacaattttcggacccctcacagctccgcaaacaagaagacacactccgcagtctaggataaattttgtcgtataatgttcgtcgtgtcgtgtcctttgataccttctaagttcctgtatataaactaagacattgcgctgatttccggccgaagcgagcactcgataactaaattacatcagatatatgtatatgtatattgcgtacacgcagagatattcaatatttgtataatatgaactcggattcgattttagcaaatggttaattgtaagttgcaaaaatttcaatgagtgtgtgcatgtttaccccatagttgaagtcgctttcgaattaaattaactcttaaaccaaggaaaacacttaacaaaactactcgtaaagctaaagcaacaaaaacttaaaagatacacacttaacagaagtaagcgagtgtgaaaacgatggaggggagatgtcggggaggagtaattagcataccgtaacagctacttatataacatacacatagtacatatagtaatcgtacatatgcatacatatattttcatgtgtatcgacgccgcttgatcctgatattaagtctaagtttagttgtgttgtgtaattatcgattttgttaatgttttgccccgagcattatattatattatgctaacctatacctatacctacacctacacctatgcctatcattatatgtgtataattagcctatacatacttgatgaagaaatgatttcacccactgctttattcatgttcttgtattattattatttcgagccctcgataagttgtagtctaaagtcggttatgtttatgattatgttcgattatagtttgtttagtgaattttaatctagcgttagcaattctcttttttaaaaagttaattattgtgaataaaatacaacaagttgcagaagtgcaaaaatatacacac

SEQ ID NO: 42432 - protein, 493 aa, DROSOPHILA
MQQHHLQQQQQQQQQQEQQHLQEQQQHLQQLHHHAHHHLPQPLHTTSHHHSAHPHLQQQQQQQQHAVVASSPSSVLQQQQQQSTPTTHSTPTHAVMYEDPPPVPLVAVQQQHLPAPQQQQQLQQQQQQQQQQLATTPVAGALSPAQTPTGPSAQQQQHLTSPHHQQLPQQQTPNSVASGASSNLQQQQQQQNAAVAPGQTQIVAPTTASVSPSSVSSQKEDINMSIQLAPLHIPAIRAGPGFETDTSAAVKRHTAHWAYNDEGFNQHYGSGYYDRKHMFAYPYPETQFPVGQYWGPNYRPDQTTSAAAAAAYMNEAERHVSAAARQSVEGTSTSSYEPPTYSSPGGLRGYPSENYSSSGASGGLSVGAVGPCTPNPGLHEWTGQVSVRKKRKPYSKFQTLELEKEFLFNAYVSKQKRWELARNLQLTERQVKIWFQNRRMKNKKNSQRQANQQNNNNNSSSNHNHAQATQQHHSGHHLNLSLNMGHHAAKMHQ

SEQ ID NO: 42433 - DNA, 7042 bp, DROSOPHILA
tccgcagctgctactgcttcttcttgctgcttttccacgccagcagaatgggaaatgtgctggcgctccgaacgaggctcagccgcaggagttttcttctgctcagtgggctgctcatcctgtccagcatccctctccttggcacgcttctcccccctatccgtatcgtcagttttcttggcatctttggcggattcctcctgctttgcttcctcttcctcgcgcccgctgctttcggaggacgaggactcgctcctggcgtcgctgtcgctgccactggaagtgtcgctgctgctggaattgctgctcgaatcgctctcggcatcgctttcccccatcgcgcgtttatttcgagaaattttcagggaaaacaacgatgaaaattattgggcagcaaaaaacacaacgcggcgatagaattagagatgggacaccagtggcgacggtatcgatatacacatgtgtttgactgctaaatcgtatcgaaattgtagtttcgatagtcagctatagaaatgctaaatgtgttttttaaattgaactgaaaatttaaattcaagttccacattagaaaaaatgatattttaaaattaattttataatatggcactatcgtaaattttatagcacagcgaacctcaatatttaagggcaacgatttttttacgactaaaacagtgtaatatatttgttataacatatttggttcattgcactgcagaaatttcgaatatcagctcgaaaatggaacaaggatatggaacaagaacattaaatttgaaacgaaactttttttttttagcgatttttgggctccaaaacgggcaatcgtgttttacaacatcatgcgtgcttccaattaattttaggatctgtcttaagggaatgaattgaaccattattttattgaaaattaaaaatgatagcttcatcttgaaaatagtaaaaaagatcctttatcgctcagttgaatcccctagaaaaataactggcgcactttcgcaacaaaacaactaaatttattttagtttacaaattgtttatccatagtaaatactttaaaaataagctttaatcacgacggcctacactaaacaaggaccttttgcagaaacctctaggccttgctgtccggtttgggtggaacagtttccggtaccgatggcgacacgtcgtcgtcgctggaggatgaagaggaggacgagctggagtcgtcggccttcgtccgcttctcggggatcgtgtaggggaacttctgggatttctcctccaccgcctgtttcagacgcagcagagctgtcctgttgatgttttccaaggatacgtccttaatggcattggccaagacaaccatggccttgtcggagttgcccttggtagtctggatgtcaatgaggcaggagtacgcgtttccgatcgcgccctcggagattttgctgttcttcagctgggaaatgactgtggaggcgagcttctcgtcctgctgctcgcgagccgtctgcaaaacgcgctggaacatcagccttggggcattggacaggtgcttatcccaaatctccttagaagccgcctcctggccagtggaaatcaaatgcatccacaggacattcatgggtcctagttgattgtgagcagcaaacttctcagcgagggattgatctgaaaattatcagaaaaatttatagttttaacacttgtttaataggcatttctgggacctacattgcggcaccaattccgggtgtttttccaaaatgccaactgctcctccgcgtgggaacttctcagccagcttggttgactcctcgggagttttggccgcatcgatttctgtggtcaagtgcttcaggaactcctccgcctttccggccactatattggcatgacaaaaccgattgtcaaaggaaatcagacgcttctgctcgtcattcagctgctggccaattctctgcattgtttccagatcgcctgcagcggcaattttgttcaggtaaaacttgaagatcttgggctgcgggtgcagtttatcgcccaggagctcctcgacatacttggtggcctccgttaagcgatcagctcgaaccaggagctcgatcagtcgagaggtgtccaaagctccaattttctcgccactcagaacactttgtttatgcgagatggctgcatctggatcattggcctggattgccttgcggaagccggacaaatgggaggcggttttgggtggctttgctgtttccgttttagctggctcctttttcgcagccttctccttgggctgttctgctactttagctgtttctgtggctgcttctgttgtcgttgcatctttcgctttgctttttttggccttggcttgttcgttttgggtctctggcaccacaaaaggcacgtcaatatttttcttactcaggatttctgccaatttcaaaaggaaagcatcgtttggtgtcacattctcctcctgcattttagtccacagtcccaaagccttctccgcctcatctgccttgtcgtagctcaagaggagcgtgtagtaaatcttattcctgtcgatatgtcccaggtccttcgtggcttcaataagaccttccagcggttgcagtagtccctcattcttgtaacgatcacaggcactgtttattctttgcggacgggtacgcagtccgggggtttccaggatcttcctggcctgccgcacacggccgcactccacaaaggagaagaccagatcgtaaaggctgtttacttcaccatggattccagtgctcaagtctgttaacttttgcagattggcagcatcttctttctgtattagacggcaagccagctcgttcttccaaggcgtggacttatacttctggcaaatctcctcgaaggcttcgattgccttgggaatatcatccttgaccaggtgaaccttgatcagtggacccagcagcacattggtgggcacaatataattggcccccaccagtacgtcgaacaatttgcgcagcctctccggctgaccggcctcggctagtgagttcaaaattctccacacggtgctcatgtaattatagcttccttcggcctcggctacgggaacttccttcttgttctcctccagtatcttaaaagcagcatccacgcgttcctcttgcaagagaagatcagccagtcgaaccgccttcaagttatccaactggaaagtggcgtcctttgctttaagtttgccatagatttctaaggcctcagagcttttcttgtgatgcgtgttcagatcgatgagctgggcataaatgccaacggggatttggaatttttcggcctcgagtttctcgatgacctggagggtcttctccaagttttgcgaacggaaacaggcgttgaggagttgcctcttgatgttgttggcattttctcccttgccctccacattcacaatgaatcgctcgagttctgaaagaaaatatatagatattagataagtattttaataacatctaacaacttaccattgatggacagcgaatccaggcttctcttgccgctgtttggaagaggaactggctccagttctcccgagctaagtttacccagaagttcggaaatctttggagtcagttcggaacccaactgctcggatagttgggtggctttgtcactgctaatggacaagccctgcttgaccaaccctttgaggattttctccaacgtggccccgcgatcgcggcggaaataggtggttgcctcctggactattgcacctacaacatcgggagtgatgcgctccgtcggaacggcagccacgccttctacctgctcaacttcctcatccttgccttgcctgaattgcaatccttcgtgaatttggcggacacatcggatgaaggaggcataatcgttcgtatggctgagggccagaatcaaaggttgtttgaacaagaagggcacgtagtaagctctgttcttctccataatcttggctgcttcggcaatctggtgggtcactaatgcggagtagacggccgaggtgacagcagtggagttgggaaccccagcatccctcagagaggtgacgattctttcccagttcttttccttcaagttgggaatgacataatctctgaccgtttcggagttggggaaaactgagaactcctgctgcatgcgacgtacgatttccaagacttgattagattccgcggaacagatcaaaggccagaagtagtgctgcctgatgggcaagccagcatttttcatttcctgcagcaagggaagcgcattattgattacgccattggtcaagccagcttcggtggcaatagtcagagccttgggattaagcccctctgattgcaggctcttgcagatggacaagatcttctccactggccgattggccttaaccatctgcctgatgaagaaagctcccacatcaacgggctcaccgttcacacgactgctccttggcatcacgcgaaggagcttcagccccacatcctcgtgtcccttgttgaccagccgaaggatcacgttcactgcatcctgattaaaaccaggcgagagacgaagcttggtcagaacgtcatccacgtgttcaccattgccgttgacggtaagagtgtacacaatgtccagcagatccttgtccagcaaaatgatctccttctgctcacactcagctagggtttcctttacggcagccaggtctccgtggcgcgcaaaggcgcacaggagagtggtgtaggtgtcagcactgggctccaagccggcctgcatcatcactcccaagatacccttggcggactccaaatcattggcctaaagaatcgtttaaaaagtaatttaaaaacatggctaccacctatctatttctgtatgactaacctgcgagtgacccaggataagtgaattaaagacattttcgttgacgggtagacttttggcgcgcatgaattccagaatcctagtggctccttcaatgtctccctgctgacaatagcgagcaatcaatcgctgataggtcaccctattgggctcgatgcccttcgcctcgatctctgccagaaaatcggtgggagcaaacccatgctcgttctccaggtaaacgcgaagcagggcattgtagtgcgagatgtccatgggtacattcagcgcattcagcgtcttccagatctcctgcaccaaggcagttctgacctcgggaagctcctccggtaccaggttgccgcagcagcgaatcaccagcagcgattgcgagctggtggccgtcctgtgtgagcggatctcatcgagcacctcctccagatcgcgtctggagatgcgcccaatgcgacgaacatcctggtccagccggcgaatctgtttatccaaactcaactcagctttggccgccgcattcgtggcaaaaccactaggaagataattaaaaataaacttaattaatatataaagatatatgaattaacaaaatcctaacgtccttatagattattttccggctgaccttaatgagaaactgagttgttataagataatcgtgttgctttttgaataaaaataagatatttagcttctttctacatatataactagactttctacaagaaaaacgctcgactaaggccaaaattggatgagcacatagtaggcgctccaaatccggatgaggttatgtaaatatgtgagacatcagtcgaatgcaactgcgatgatcccaagtggcggcacgtgcgcctcttttcgggattcaatcgctggaaagtggacgattccccactaatcacgtaaatacatgagcacattgcgtaatgccggcgatttggggccagattttactcacttttggaactggccgcacatgcagggcgcattgttcagcagattgctcgtctcgttctcgcgaaccgagttcaccagcacattgcgtgtgaagccggcgaagtagcgcagcagtttgcccgtcctcaggatggatgccatggcggaatcgttcggttttaattaataaatgagcttattattaaaatgacgttcgcacgagtgcggctgaaaccgatgtctcttcgcgcctatcgatgtttacctgcgacaatcgattgttttcggtgggaccaaaacgttcaaatcaaatgtatcagcttagcggtgacacaaacgagaggatatttgaacagtgcctaagcctgtcagcttaaccgatttaatttgctttttttcggatcggaaactctaatcgtaccccgtatatacttgaactaaaatgtctctgaatctgcagtacgaggacattggcaaggaatttgtccagcagtactacgccatattcgatgacccggcgaatcgggagaacgtgattaatttctataacgctaccgactctttcatgacctttgaaggcaaccaaatacagggagcacccaagattctggaaaaagttcagagtctgagctttcagaagattgccagagtgataaccacagtggattcgcagccaacttccgatggcggagttctgatcatcgtccttggaagactaaaatgcgatgacgatcccccacatgcattctcgcagatctttttgctgaagcccaacggaggatccctcttcgtggctcacgacatcttccgtctgaacatccacaactctgcctaggagcactccagacccatatgtacaccacacataatcgacatccaaagacgcccagcgcctaatagtgataacatgataacaacagcacggcagtgggactcagaaaaaagcaaaacaaagccagccaacggtctcaagatcgtcagcgaatacaaaagttaatacaagacaaacaaaaaaataattaaaaaaagcttaggacttttattttgaaaactttttcgagaaataaaatagaaacaaatcttttcccaattcacaaataatgggtcacattggaattttgaagcaatagtctttaatatttgtagtcttcatacgatgcatgttttattctagcttaatttttcggagctgtctttgtgtttgcaatgccaaaagtgcgctgtaaatgcaccg

SEQ ID NO: 42434 - DNA, 4428 bp, DROSOPHILA
tttcagccgcactcgtgcgaacgtcattttaataataagctcatttattaattaaaaccgaacgattccgccatggcatccatcctgaggacgggcaaactgctgcgctacttcgccggcttcacacgcaatgtgctggtgaactcggttcgcgagaacgagacgagcaatctgctgaacaatgcgccctgcatgtgcggccagttccaaaatggttttgccacgaatgcggcggccaaagctgagttgagtttggataaacagattcgccggctggaccaggatgttcgtcgcattgggcgcatctccagacgcgatctggaggaggtgctcgatgagatccgctcacacaggacggccaccagctcgcaatcgctgctggtgattcgctgctgcggcaacctggtaccggaggagcttcccgaggtcagaactgccttggtgcaggagatctggaagacgctgaatgcgctgaatgtacccatggacatctcgcactacaatgccctgcttcgcgtttacctggagaacgagcatgggtttgctcccaccgattttctggcagagatcgaggcgaagggcatcgagcccaatagggtgacctatcagcgattgattgctcgctattgtcagcagggagacattgaaggagccactaggattctggaattcatgcgcgccaaaagtctacccgtcaacgaaaatgtctttaattcacttatcctgggtcactcgcaggccaatgatttggagtccgccaagggtatcttgggagtgatgatgcaggccggcttggagcccagtgctgacacctacaccactctcctgtgcgcctttgcgcgccacggagacctggctgccgtaaaggaaaccctagctgagtgtgagcagaaggagatcattttgctggacaaggatctgctggacattgtgtacactcttaccgtcaacggcaatggtgaacacgtggatgacgttctgaccaagcttcgtctctcgcctggttttaatcaggatgcagtgaacgtgatccttcggctggtcaacaagggacacgaggatgtggggctgaagctccttcgcgtgatgccaaggagcagtcgtgtgaacggtgagcccgttgatgtgggagctttcttcatcaggcagatggttaaggccaatcggccagtggagaagatcttgtccatctgcaagagcctgcaatcagaggggcttaatcccaaggctctgactattgccaccgaagctggcttgaccaatggcgtaatcaataatgcgcttcccttgctgcaggaaatgaaaaatgctggcttgcccatcaggcagcactacttctggcctttgatctgttccgcggaatctaatcaagtcttggaaatcgtacgtcgcatgcagcaggagttctcagttttccccaactccgaaacggtcagagattatgtcattcccaacttgaaggaaaagaactgggaaagaatcgtcacctctctgagggatgctggggttcccaactccactgctgtcacctcggccgtctactccgcattagtgacccaccagattgccgaagcagccaagattatggagaagaacagagcttactacgtgcccttcttgttcaaacaacctttgattctggccctcagccatacgaacgattatgcctccttcatccgatgtgtccgccaaattcacgaaggattgcaattcaggcaaggcaaggatgaggaagttgagcaggtagaaggcgtggctgccgttccgacggagcgcatcactcccgatgttgtaggtgcaatagtccaggaggcaaccacctatttccgccgcgatcgcggggccacgttggagaaaatcctcaaagggttggtcaagcagggcttgtccattagcagtgacaaagccacccaactatccgagcagttgggttccgaactgactccaaagatttccgaacttctgggtaaacttagctcgggagaactggagccagttcctcttccaaacagcggcaagagaagcctggattcgctgtccatcaatgaactcgagcgattcattgtgaatgtggagggcaagggagaaaatgccaacaacatcaagaggcaactcctcaacgcctgtttccgttcgcaaaacttggagaagaccctccaggtcatcgagaaactcgaggccgaaaaattccaaatccccgttggcatttatgcccagctcatcgatctgaacacgcatcacaagaaaagctctgaggccttagaaatctatggcaaacttaaagcaaaggacgccactttccagttggataacttgaaggcggttcgactggctgatcttctcttgcaagaggaacgcgtggatgctgcttttaagatactggaggagaacaagaaggaagttcccgtagccgaggccgaaggaagctataattacatgagcaccgtgtggagaattttgaactcactagccgaggccggtcagccggagaggctgcgcaaattgttcgacgtactggtgggggccaattatattgtgcccaccaatgtgctgctgggtccactgatcaaggttcacctggtcaaggatgatattcccaaggcaatcgaagccttcgaggagatttgccagaagtataagtccacgccttggaagaacgagctggcttgccgtctaatacagaaagaagatgctgccaatctgcaaaagttaacagacttgagcactggaatccatggtgaagtaaacagcctttacgatctggtcttctcctttgtggagtgcggccgtgtgcggcaggccaggaagatcctggaaacccccggactgcgtacccgtccgcaaagaataaacagtgcctgtgatcgttacaagaatgagggactactgcaaccgctggaaggtcttattgaagccacgaaggacctgggacatatcgacaggaataagatttactacacgctcctcttgagctacgacaaggcagatgaggcggagaaggctttgggactgtggactaaaatgcaggaggagaatgtgacaccaaacgatgctttccttttgaaattggcagaaatcctgagtaagaaaaatattgacgtgccttttgtggtgccagagacccaaaacgaacaagccaaggccaaaaaaagcaaagcgaaagatgcaacgacaacagaagcagccacagaaacagctaaagtagcagaacagcccaaggagaaggctgcgaaaaaggagccagctaaaacggaaacagcaaagccacccaaaaccgcctcccatttgtccggcttccgcaaggcaatccaggccaatgatccagatgcagccatctcgcataaacaaagtgttctgagtggcgagaaaattggagctttggacacctctcgactgatcgagctcctggttcgagctgatcgcttaacggaggccaccaagtatgtcgaggagctcctgggcgataaactgcacccgcagcccaagatcttcaagttttacctgaacaaaattgccgctgcaggcgatctggaaacaatgcagagaattggccagcagctgaatgacgagcagaagcgtctgatttcctttgacaatcggttttgtcatgccaatatagtggccggaaaggcggaggagttcctgaagcacttgaccacagaaatcgatgcggccaaaactcccgaggagtcaaccaagctggctgagaagttcccacgcggaggagcagttggcattttggaaaaacacccggaattggtgccgcaatatcaatccctcgctgagaagtttgctgctcacaatcaactaggacccatgaatgtcctgtggatgcatttgatttccactggccaggaggcggcttctaaggagatttgggataagcacctgtccaatgccccaaggctgatgttccagcgcgttttgcagacggctcgcgagcagcaggacgagaagctcgcctccacagtcatttcccagctgaagaacagcaaaatctccgagggcgcgatcggaaacgcgtactcctgcctcattgacatccagactaccaagggcaactccgacaaggccatggttgtcttggccaatgccattaaggacgtatccttggaaaacatcaacaggacagctctgctgcgtctgaaacaggcggtggaggagaaatcccagaagttcccctacacgatccccgagaagcggacgaaggccgacgactccagctcgtcctcctcttcatcctccagcgacgacgacgtgtcgccatcggtaccggaaactgttccacccaaaccggacagcaaggcctagaggtttctgcaaaaggtccttgtttagtgtaggccgtcgtgattaaagcttatttttaaagtatttactatggataaacaatttgtaaactaaaataaatttagttgttttgttgcg

SEQ ID NO: 42435 - protein, 1275 aa, DROSOPHILA
MDISHYNALLRVYLENEHGFAPTDFLAEIEAKGIEPNRVTYQRLIARYCQQGDIEGATRILEFMRAKSLPVNENVFNSLILGHSQANDLESAKGILGVMMQAGLEPSADTYTTLLCAFARHGDLAAVKETLAECEQKEIILLDKDLLDIVYTLTVNGNGEHVDDVLTKLRLSPGFNQDAVNVILRLVNKGHEDVGLKLLRVMPRSSRVNGEPVDVGAFFIRQMVKANRPVEKILSICKSLQSEGLNPKALTIATEAGLTNGVINNALPLLQEMKNAGLPIRQHYFWPLICSAESNQVLEIVRRMQQEFSVFPNSETVRDYVIPNLKEKNWERIVTSLRDAGVPNSTAVTSAVYSALVTHQIAEAAKIMEKNRAYYVPFLFKQPLILALSHTNDYASFIRCVRQIHEGLQFRQGKDEEVEQVEGVAAVPTERITPDVVGAIVQEATTYFRRDRGATLEKILKGLVKQGLSISSDKATQLSEQLGSELTPKISELLGKLSSGELEPVPLPNSGKRSLDSLSINELERFIVNVEGKGENANNIKRQLLNACFRSQNLEKTLQVIEKLEAEKFQIPVGIYAQLIDLNTHHKKSSEALEIYGKLKAKDATFQLDNLKAVRLADLLLQEERVDAAFKILEENKKEVPVAEAEGSYNYMSTVWRILNSLAEAGQPERLRKLFDVLVGANYIVPTNVLLGPLIKVHLVKDDIPKAIEAFEEICQKYKSTPWKNELACRLIQKEDAANLQKLTDLSTGIHGEVNSLYDLVFSFVECGRVRQARKILETPGLRTRPQRINSACDRYKNEGLLQPLEGLIEATKDLGHIDRNKIYYTLLLSYDKADEAEKALGLWTKMQEENVTPNDAFLLKLAEILSKKNIDVPFVVPETQNEQAKAKKSKAKDATTTEAATETAKVAEQPKEKAAKKEPAKTETAKPPKTASHLSGFRKAIQANDPDAAISHKQSVLSGEKIGALDTSRLIELLVRADRLTEATKYVEELLGDKLHPQPKIFKFYLNKIAAAGDLETMQRIGQQLNDEQKRLISFDNRFCHANIVAGKAEEFLKHLTTEIDAAKTPEESTKLAEKFPRGGAVGILEKHPELVPQYQSLAEKFAAHNQLGPMNVLWMHLISTGQEAASKEIWDKHLSNAPRLMFQRVLQTAREQQDEKLASTVISQLKNSKISEGAIGNAYSCLIDIQTTKGNSDKAMVVLANAIKDVSLENINRTALLRLKQAVEEKSQKFPYTIPEKRTKADDSSSSSSSSSSDDDVSPSVPETVPPKPDSKA

SEQ ID NO: 42436 - DNA, 6406 bp, DROSOPHILA
attagaagttggcaacgcaacatggtgtggccaggttccacatcgaagtaaaattgtttttagcgggacatttctttaaaaaagagatgaataacataactataaattgcttaatttaatgtactaaatataatatatccttcgatattcctgaaattacccgtatttttatagcaatcttacgattttaaatttgttttagaaatttacttgtaaattacattactaaatttggtataacaataaataatcttccgttcaaaaaattccagacaacttcaaaaacgtataatttagactacagctttttaagaaaatttgtataaaatttcaacaagaaaaaaaattaataataggcgcaagcaaagcctaaattgaattttttaaagttattttttttaattaagcatcaaattttagatttttttaaaaaatttaaaacgaataagtcagtaaataaatattttttgtatcggtgaaaataaaaatggaattataatatattcattattataaatgataaatatttataagtgttaaagaccttatatagtatataatctggtaatgttcgtccgtctgttcgtatgaacgaagtgaaatcaagaattattacaagctagaagtttaaaattaagcatacttattataaaaacggaaatttttttggaagatgtcccacaaacatcccaaatcagttattctaacagttttgaaagaggttttaattaattttcattttataaattaccaattccatcaaatgccaaaaatctattggcagtacacacattttgacccccacaatccgcaaattgctgtcacgcccacaattttttttttttattttaatagaattttaaatttatgtagtttgaaaacttttttttacccttcatttaaatgtttagcaattgttagttgtaagttatctaatggatattagctgcctatctataagtatctccgttgtacaaaaagttacacaattggttgaaatttgcatttgtacatttatttttgttttatcggtttagtgggttttgctttgtacatgtgtaaaagtaaaatatttaacacaaatattcatctgcctttgttggtcacgtcacgttgtccagtctccagattcagctgcgtcccttggaacggcgtgagctgcgctcccttcgcgaacgatcacgggatccatcgtcacgctctcttttacgctcccgttgtcccttcagatcacgatccctatcccgttcccgctccttggcacgactgcgttccttttcgcgatctgacctctctccacgatctgatctctctccacgatctgatctctctccacggtctgatctctctccacggtctgatctttctccgcggtccgatctctctccacgatctgatctctcgtttctggaggaacggtcaccacgacgactgtctttttcactgcgactactctccatccgcttttcgcgaggagcggagttctctcttattgttggtctttcataagatcgtgatcgatcccgttttcgttgtctatcgtgggcaactgcatttcggttcttccgttctttatcgtatgaactctctcggtttctttctctgtcgtatgaagaattcccccgctttcgttctctatcgtacgaagaatttcccctgtttctttctctgtcgtacgaagaattctcccggtttcgttctctgccagttgagttatctctgcgcctctggccatttccattcggctgaaagcgatttttggatccaggaccttccaaattaaactcatcactatcttgggtccttcctcggaacttatttttttcgacatgctcctggcgcttgatcttcgcctgaggctcagcgtcactttcatcgctggaagaattcgatgagtcggatgattcggaggtggacttatcgctgtcttcgctgccactggaatccgagctctcttgactttttcttctgtgctttgatttcttcttggcagccttcttttcctccttcttacgctttttatccttctccttttcctttttgctctttctttgcttctctttttctttttcttgttccttttccgccttcttcttcttctttttgttcttggtctttttcgacttctctttagtcgctttcttagatttctttttatccttgtccttgcgtttgcgtttctttttgggttccgagctagaatcggagcttgaagattcactagaagagtcggaactgctgtcctcttcactggagtcttcgctgtccgtgtccgaagacgacgatgacgaggaggacgaagatggggccaccttggtgtttccagcgggtgcagagccatctctgaaaggattccccccggcattggccagaatttcagcatttattgcgggcacagatttgggggcgttttttaggaatcttctcaaatcgtcggtgagaccacccaaaccaatcgaggtgaaaaagttaatggagaagcgggtattccgtggattatccttgggaaacaaaccagctatgctctctaccaaaacatcatccttcagcttggcattcagtttgcccagtcccatatactcagctagctcctggaacaggatttttatgaaaatgcggctcgatgacgtggtatcatcctcgttcagttggatgcactccagcacatcccaactaatggcgtccgtaaacaggagatgggcgaagaacttgctgacgtttcgcaaacgatttgtgtccaatctgtgggtggtttgataggtgtccttaaaaatctcctcgaagggcggtatgtagatcttattgatgttgcagaaccgctgcgccagcagtccgtagaacttctcgtatgttctctgttccgcacagcaatcgagaaacatgtgacagagctcgatttcttgtccgggtttcagttgcattttcatcagtttatgagcacactcctcataatccaaactggagttgattgttaagtaaattgtgcgtcgcagggcaatcagattggtttcagtgctgtcaatgatgtcgccagcctcggctttcttttccgcatcggatccggattctccatccgaatcactatccgaatctgatccggagcccgagcctgaactactgccatcgtcgcttcccaggatctcacgacttaggcctttgtatttgtcctcattttcggcataattgtcgtcaaatttaaaaacatctataaagaaacgtaaaaattattagagttcaatacaaactaaacctttcgtagataaactcacttagtatatcttccgtttcggtggcttcatccagcatcatcagatgtgtgaactgatcgtcctcctcaacgagctccagttccggaacaacagcctgatgatccttaaagccatcctttcgaatctgaaacagcacctcaatcatgtactgtacacgcttgtccaactttccctcgtgcagaatgtttctcagcatctcgaagatggccccaatgcctttagacgaaacctcagtcagtttcataccacactctttcagaaaagcgatggctacctctacagaatcgtccgttggcgtttccaccagcagggtaaggatttctagtgccagaatctcatgtgccaccctctggttaaccaaatggccaatgaatcgagtggccgacatgcaaaccatcttatcattgcgtcggaacgccctacgaaattggatgaccagacgtttgaggaggagctctcctatgttcggaaactttgaatttataatgctcaccagagcggcgtatacatgggtgaatgtgggcgaagcagcctgggcttggatgatgctcctgcttagtaagccccttcccctcacgatattctctcttagaagctctctggtgatgatggctatatttgttacattcactttgtttatgtaaccatggatcgatttcttgagagcctcccaagcaattctctgataggcagcggatgatttgtccgtgatctgtgactgcatcatgcgcagcttcgccggcggaatataggctcctccagtccgagatgtcagcacatcgacggtctttcgttggcgctcagttattttggctgccggttcggttacggtttcattgtctgcattagtttcggtggtttcggtgtggcgtggggtctttgaggatttggatttcggagtggaggaggatcgatctcttttgcgttctggcgacctcttcttttccctcgaatcatctctacgcctgctgctggttggttcgcccttttgatggcgcttttctcgctccttggctcgctcttcatcgcgtttatctcgctcctcatgacgtctctgtcgctcaacgcgtcttctctccaaagaattggatctgcggcggattggacttttactgcgactccgggtcctgctgcctttgcttctcgagcgacgacgacgacggctgctgggtgatggactcctgctggatgagcgtgggcgtcgtcgtttgccatccgggctgcggctttgttttcgttgggtttctttgggtggactcttagatgcgacagctttcttttcctctttagtcggtaggtcatcttcgtctttctaaaaaatgaaaatttatcatatcatgatgatgaaaaaactagctgataaatgattgtgttgaattaatttcattaattaaataatttgaatttcattgatgacgaaatagtaaagcggcttaataccgaattctacccaaacatgatgacttacgtcggttatctcgccctcttcgatgtggtccgcagtgggaggtttcactgtttcagctgctgcttccaccggcgattccttgctacttccattggtggtcactggctgctcttcatccttcctccgctcttctaattcccgtgcagcgttttcctcttgggccttcgggctgttcagctctttcgtcacacttgaggcttctgcttcctctttccgctggacaggtgtttcaacttttttcgcttcatttaatttctcgctttccgcctccgcagctgctactgcttcttcttgctgcttttccacgccagcagaatgggaaatgtgctggcgctccgaacgaggctcagccgcaggagttttcttctgctcagtgggctgctcatcctgtccagcatccctctccttggcacgcttctcccccctatccgtatcgtcagttttcttggcatctttggcggattcctcctgctttgcttcctcttcctcgcgcccgctgctttcggaggacgaggactcgctcctggcgtcgctgtcgctgccactggaagtgtcgctgctgctggaattgctgctcgaatcgctctcggcatcgctttcccccatcgcgcgtttatttcgagaaattttcagggaaaacaacgatgaaaattattgggcagcaaaaaacacaacgcggcgatagaattagagatgggacaccagtggcgacggtatcgatatacacatgtgtttgactgctaaatcgtatcgaaattgtagtttcgatagtcagctatagaaatgctaaatgtgttttttaaattgaactgaaaatttaaattcaagttccacattagaaaaaatgatattttaaaattaattttataatatggcactatcgtaaattttatagcacagcgaacctcaatatttaagggcaacgatttttttacgactaaaacagtgtaatatatttgttataacatatttggttcattgcactgcagaaatttcgaatatcagctcgaaaatggaacaaggatatggaacaagaacattaaatttgaaacgaaactttttttttttagcgatttttgggctccaaaacgggcaatcgtgttttacaacatcatgcgtgcttccaattaattttaggatctgtcttaagggaatgaattgaaccattattttattgaaaattaaaaatgatagcttcatcttgaaaatagtaaaaaagatcctttatcgctcagttgaatcccctagaaaaataactggcgcactttcgcaacaaaacaactaaatttattttagtttacaaattgtttatccatagtaaatactttaaaaataagctttaatcacgacggcctacactaaacaaggaccttttgcagaaacctctaggccttgctgtccggtttgggtggaacagtttccggtaccgatggcgacacgtcgtcgtcgctggaggatgaagaggaggacgagctggagtcgtcggccttcgtccgcttctcggggatcgtgtaggggaacttctgggatttctcctccaccgcctgtttcagacgcagcagagctgtcctgttgatgttttccaaggatacgtccttaatggcattggccaagacaaccatggccttgtcggagttgcccttggtagtctggatgtcaatgaggcagg

SEQ ID NO: 42437 - DNA, 4030 bp, DROSOPHILA
ttttttgctgcccaataattttcatcgttgttttccctgaaaatttctcgaaataaacgcgcgatgggggaaagcgatgccgagagcgattcgagcagcaattccagcagcagcgacacttccagtggcagcgacagcgacgccaggagcgagtcctcgtcctccgaaagcagcgggcgcgaggaagaggaagcaaagcaggaggaatccgccaaagatgccaagaaaactgacgatacggataggggggagaagcgtgccaaggagagggatgctggacaggatgagcagcccactgagcagaagaaaactcctgcggctgagcctcgttcggagcgccagcacatttcccattctgctggcgtggaaaagcagcaagaagaagcagtagcagctgcggaggcggaaagcgagaaattaaatgaagcgaaaaaagttgaaacacctgtccagcggaaagaggaagcagaagcctcaagtgtgacgaaagagctgaacagcccgaaggcccaagaggaaaacgctgcacgggaattagaagagcggaggaaggatgaagagcagccagtgaccaccaatggaagtagcaaggaatcgccggtggaagcagcagctgaaacagtgaaacctcccactgcggaccacatcgaagagggcgagataaccgacaaagacgaagatgacctaccgactaaagaggaaaagaaagctgtcgcatctaagagtccacccaaagaaacccaacgaaaacaaagccgcagcccggatggcaaacgacgacgcccacgctcatccagcaggagtccatcacccagcagccgtcgtcgtcgtcgctcgagaagcaaaggcagcaggacccggagtcgcagtaaaagtccaatccgccgcagatccaattctttggagagaagacgcgttgagcgacagagacgtcatgaggagcgagataaacgcgatgaagagcgagccaaggagcgagaaaagcgccatcaaaagggcgaaccaaccagcagcaggcgtagagatgattcgagggaaaagaagaggtcgccagaacgcaaaagagatcgatcctcctccactccgaaatccaaatcctcaaagaccccacgccacaccgaaaccaccgaaactaatgcagacaatgaaaccgtaaccgaaccggcagccaaaataactgagcgccaacgaaagaccgtcgatgtgctgacatctcggactggaggagcctatattccgccggcgaagctgcgcatgatgcagtcacagatcacggacaaatcatccgctgcctatcagagaattgcttgggaggctctcaagaaatcgatccatggttacataaacaaagtgaatgtaacaaatatagccatcatcaccagagagcttctaagagagaatatcgtgaggggaaggggcttactaagcaggagcatcatccaagcccaggctgcttcgcccacattcacccatgtatacgccgctctggtgagcattataaattcaaagtttccgaacataggagagctcctcctcaaacgtctggtcatccaatttcgtagggcgttccgacgcaatgataagatggtttgcatgtcggccactcgattcattggccatttggttaaccagagggtggcacatgagattctggcactagaaatccttaccctgctggtggaaacgccaacggacgattctgtagaggtagccatcgcttttctgaaagagtgtggtatgaaactgactgaggtttcgtctaaaggcattggggccatcttcgagatgctgagaaacattctgcacgagggaaagttggacaagcgtgtacagtacatgattgaggtgctgtttcagattcgaaaggatggctttaaggatcatcaggctgttgttccggaactggagctcgttgaggaggacgatcagttcacacatctgatgatgctggatgaagccaccgaaacggaagatatactaaatgtttttaaatttgacgacaattatgccgaaaatgaggacaaatacaaaggcctaagtcgtgagatcctgggaagcgacgatggcagtagttcaggctcgggctccggatcagattcggatagtgattcggatggagaatccggatccgatgcggaaaagaaagccgaggctggcgacatcattgacagcactgaaaccaatctgattgccctgcgacgcacaatttacttaacaatcaactccagtttggattatgaggagtgtgctcataaactgatgaaaatgcaactgaaacccggacaagaaatcgagctctgtcacatgtttctcgattgctgtgcggaacagagaacatacgagaagttctacggactgctggcgcagcggttctgcaacatcaataagatctacataccgcccttcgaggagatttttaaggacacctatcaaaccacccacagattggacacaaatcgtttgcgaaacgtcagcaagttcttcgcccatctcctgtttacggacgccattagttgggatgtgctggagtgcatccaactgaacgaggatgataccacgtcatcgagccgcattttcataaaaatcctgttccaggagctagctgagtatatgggactgggcaaactgaatgccaagctgaaggatgatgttttggtagagagcatagctggtttgtttcccaaggataatccacggaatacccgcttctccattaactttttcacctcgattggtttgggtggtctcaccgacgatttgagaagattcctaaaaaacgcccccaaatctgtgcccgcaataaatgctgaaattctggccaatgccggggggaatcctttcagagatggctctgcacccgctggaaacaccaaggtggccccatcttcgtcctcctcgtcatcgtcgtcttcggacacggacagcgaagactccagtgaagaggacagcagttccgactcttctagtgaatcttcaagctccgattctagctcggaacccaaaaagaaacgcaaacgcaaggacaaggataaaaagaaatctaagaaagcgactaaagagaaaagaaaaagtcaagagagctcggattccagtggcagcgaagacagcgataagtccacctccgaatcatccgactcatcgaattcttccagcgatgaaagtgacgctgagcctcaggcgaagatcaagcgccaggagcatgtcgaaaaaaataagttccgaggaaggacccaagatagtgatgagtttaatttggaaggtcctggatccaaaaatcgctttcagccgaatggaaatggccagaggcgcagagataactcaactggcagagaacgaaaccgggagaattcttcgtacgacagagaaagaaacaggggaaattcttcgtacgatagagaacgaaagcgggggaattcttcatacgacagagaaagaaaccgagagagttcatacgataaagaacggaagaaccgaaatgcagttgcccacgatagacaacgaaaacgggatcgatcacgatcttatgaaagaccaacaataagagagaactccgctcctcgcgaaaagcggatggagagtagtcgcagtgaaaaagacagtcgtcgtggtgaccgttcctccagaaacgagagatcagatcgtggagagagatcggaccgcggagaaagatcagaccgtggagagagatcagaccgtggagagagatcagatcgtggagagagatcagatcgtggagagaggtcagatcgcgaaaaggaacgcagtcgtgccaaggagcgggaacgggatagggatcgtgatctgaagggacaacgggagcgtaaaagagagcgtgacgatggatcccgtgatcgttcgcgaagggagcgcagctcacgccgttccaagggacgcagctgaatctggagactggacaacgtgacgtgaccaacaaaggcagatgaatatttgtgttaaatattttacttttacacatgtacaaagcaaaacccactaaaccgataaaacaaaaataaatgtacaaatgcaa

SEQ ID NO: 42438 - protein, 1278 aa, DROSOPHILA
MGESDAESDSSSNSSSSDTSSGSDSDARSESSSSESSGREEEEAKQEESAKDAKKTDDTDRGEKRAKERDAGQDEQPTEQKKTPAAEPRSERQHISHSAGVEKQQEEAVAAAEAESEKLNEAKKVETPVQRKEEAEASSVTKELNSPKAQEENAARELEERRKDEEQPVTTNGSSKESPVEAAAETVKPPTADHIEEGEITDKDEDDLPTKEEKKAVASKSPPKETQRKQSRSPDGKRRRPRSSSRSPSPSSRRRRRSRSKGSRTRSRSKSPIRRRSNSLERRRVERQRRHEERDKRDEERAKEREKRHQKGEPTSSRRRDDSREKKRSPERKRDRSSSTPKSKSSKTPRHTETTETNADNETVTEPAAKITERQRKTVDVLTSRTGGAYIPPAKLRMMQSQITDKSSAAYQRIAWEALKKSIHGYINKVNVTNIAIITRELLRENIVRGRGLLSRSIIQAQAASPTFTHVYAALVSIINSKFPNIGELLLKRLVIQFRRAFRRNDKMVCMSATRFIGHLVNQRVAHEILALEILTLLVETPTDDSVEVAIAFLKECGMKLTEVSSKGIGAIFEMLRNILHEGKLDKRVQYMIEVLFQIRKDGFKDHQAVVPELELVEEDDQFTHLMMLDEATETEDILNVFKFDDNYAENEDKYKGLSREILGSDDGSSSGSGSGSDSDSDSDGESGSDAEKKAEAGDIIDSTETNLIALRRTIYLTINSSLDYEECAHKLMKMQLKPGQEIELCHMFLDCCAEQRTYEKFYGLLAQRFCNINKIYIPPFEEIFKDTYQTTHRLDTNRLRNVSKFFAHLLFTDAISWDVLECIQLNEDDTTSSSRIFIKILFQELAEYMGLGKLNAKLKDDVLVESIAGLFPKDNPRNTRFSINFFTSIGLGGLTDDLRRFLKNAPKSVPAINAEILANAGGNPFRDGSAPAGNTKVAPSSSSSSSSSSDTDSEDSSEEDSSSDSSSESSSSDSSSEPKKKRKRKDKDKKKSKKATKEKRKSQESSDSSGSEDSDKSTSESSDSSNSSSDESDAEPQAKIKRQEHVEKNKFRGRTQDSDEFNLEGPGSKNRFQPNGNGQRRRDNSTGRERNRENSSYDRERNRGNSSYDRERKRGNSSYDRERNRESSYDKERKNRNAVAHDRQRKRDRSRSYERPTIRENSAPREKRMESSRSEKDSRRGDRSSRNERSDRGERSDRGERSDRGERSDRGERSDRGERSDRGERSDREKERSRAKERERDRDRDLKGQRERKRERDDGSRDRSRRERSSRRSKGRS

SEQ ID NO: 42439 - DNA, 2671 bp, DROSOPHILA
ttttaagtagtttacccaactcctccgcctcctgactcctggattttaagcagatggagcccggaaatgagatatcacacacgacttaatcgcaggaacacgaacaggaaacagatggaatcgtcgatgatggaagtctactacgtatgagtaggtataagttattaccactgaagtattaaaaaaccacattattaagtaatgacagaacaccttctgtgaattacacggtcatgtttcatacaaatacatagcttgcatatcaacgatttccttataaaagatattcttagttagaaagaaaactttcacccaatagcagttttctccattaactttggtatatgaacaactaaaacagtattaactgtttattttattactgtacttactatttacttacttatcaagtcctcgagcatttttaacatttgaaaaataagaaccagtgctaaggaataattattcttcgctatgcacatgcaatattaatctgctcttacccaattggataatatatttacgtacaataagatctttatgaatgcatcattgcaaatgcagatggttaactaagtttgtaattcacaaatattcttccaaaggggctttactcaacatttaatgtcactgaccattcagccaagtaaatcaccttcccaaactaatttaccagtgattaattgggctagcaagtgtaggtgattggagtatactagccttatctaccttcggatcattccttatcaaaagcacggttgtttgggagagcccgccaaaaagccggactctatatgtagacggaaagctgcttgatggagggtctactgacccggtgtcttcttacaatcactgtttctcaaataaattggtagggacaacacactaaatacactgtagatttgaaaccaagatggttccacattagaagggcccggtgacattagtggatgtagttacttgtttgtaggtagtagctgtttcccaatgaagcacgctgtttatttgaaattaaaaaagaactggatgcatatatttcgtctgcttatcttggcgattcctcgacgccagagcggaacgcactggggcgcgagtccggctagattggtagactccatatggagatgtcaggtggtgcacccagtgctcctctcctccggctggacgagacctctacttcctgttctggttgttgcgggccatgtccttggggaaggaacgcagtggcggcgtgcggatgcggcgggcctcgcgcgaacggttgcgcaccaccttggagtggattgcgcaggacacgcagtagtggagcttcgcatagagcttgggcagcacgtacgagtcccagatgctggcctccgtgatgtcgcgcacggcggcagcctccacgatgttgcggatgacgaacttcttgattgccttgtccttgggcacgcagcgggcgcagttggtgcagcgcacgggcttcacatggccgcgattgtgcttgttgcgtcctccgttacggcgcttcttggtcatcttggcggctgcttgtcagtgggggaaacagtttgcacggccattagcatttagcactgcctttgctcagcggatggctgccataattaccttatttatcaatttcaaaatccgcccagcgaaatccgcgtgtgttcacgtttcgggaaacgaaaagaaagaaaatagtgtggacgcacccggcgaaactcggataaacggcctaaaaaatacctagccagagcgactagcgtgtttggcaaccagggctgacatttttacccgctaaaactggtttggtattccaagttctttgctttcctttttaatctatcagactcttttaatatattggaaattcgaactgcttacactaaaaaatgtcacctgaagaatattagtaaaaacgataaaggttacacatttagctatatatccatatcttattagctagatacagctttaatctgattagaagttggcaacgcaacatggtgtggccaggttccacatcgaagtaaaattgtttttagcgggacatttctttaaaaaagagatgaataacataactataaattgcttaatttaatgtactaaatataatatatccttcgatattcctgaaattacccgtatttttatagcaatcttacgattttaaatttgttttagaaatttacttgtaaattacattactaaatttggtataacaataaataatcttccgttcaaaaaattccagacaacttcaaaaacgtataatttagactacagctttttaagaaaatttgtataaaatttcaacaagaaaaaaaattaataataggcgcaagcaaagcctaaattgaattttttaaagttattttttttaattaagcatcaaattttagatttttttaaaaaatttaaaacgaataagtcagtaaataaatattttttgtatcggtgaaaataaaaatggaattataatatattcattattataaatgataaatatttataagtgttaaagaccttatatagtatataatctggtaatgttcgtccgtctgttcgtatgaacgaagtgaaatcaagaattattacaagctagaagtttaaaattaagcatacttattataaaaacggaaatttttttggaagatgtcccacaaacatcccaaatcagttattc

SEQ ID NO: 42440 - DNA, 591 bp, DROSOPHILA
tcgtttcccgaaacgtgaacacacgcggatttcgctgggcggattttgaaattgataaataagagccgccaagatgaccaagaagcgccgtaacggaggacgcaacaagcacaatcgcggccatgtgaagcccgtgcgctgcaccaactgcgcccgctgcgtgcccaaggacaaggcaatcaagaagttcgtcatccgcaacatcgtggaggctgccgccgtgcgcgacatcacggaggccagcatctgggactcgtacgtgctgcccaagctctatgcgaagctccactactgcgtgtcctgcgcaatccactccaaggtggtgcgcaaccgttcgcgcgaggcccgccgcatccgcacgccgccactgcgttccttccccaaggacatggcccgcaacaaccagaacaggaagtagaggtctcgtccagccggaggagaggagcactgggtgcaccacctgacatctccatatggagtctaccaatctagccggactcgcgccccagtgcgttccgctctggcgtcgaggaatcgccaagataagcagacgaaatatatgcatccagttcttttttaatttcaaataaa

SEQ ID NO: 42441 - protein, 114 aa, DROSOPHILA
MTKKRRNGGRNKHNRGHVKPVRCTNCARCVPKDKAIKKFVIRNIVEAAAVRDITEASIWDSYVLPKLYAKLHYCVSCAIHSKVVRNRSREARRIRTPPLRSFPKDMARNNQNRK

SEQ ID NO: 42442 - DNA, 5011 bp, DROSOPHILA
gctctgctatgtcctattgctatcctttgcagttgctaattgtttctttgtttgtagttgatagcaaacgtatttgtaaggccaaagaattttatgtataatacaccttgagtttctgtttcgcgcttgctaaagtcttccattcagattgtaaacctacaatgtaagtgttagctttacctgtaatacctacatacatatgtatacagaccacgccaagtattaaaaatcgcatgacaagtgcgttttccacaaattaaatgcgtaaacacaaattcattggaattggtattcttaaatgctaataaatttttgttcggaaaccgatgggaaacatgcttgcatttgtttttcgtttgttcgcatggtagatttagaattacgtgctctttcgaaaatctttcagaaatctggccgacccctggaataaaataaccgtctgatattcatactttcagcgagaagagtcttaccaaaaatatttgcgtaaacattggggcctgccatctgctttatagcgctacaaaactaaaggctcctatgcaataccaaacgaaatacacattaatttttttgccataaattatacattatatttatttttgcaatggaatcattttcttcacccaaaaaaggtatttttaccattgtttacagctacagcttgtacatacataatagatacacagatatttacaatgccttacaattatccttaaaataggaatctttacacaaacgctctagggacttatgctaataaaacttttgcgatttactgataaaaagaataacacatataacactaaaataagttaaggaaataaaagaaacgtgaaaacgcgcttcaaatttgctataaataatattgcacaaagaaaattaaaaggaaaatttaccgaaaactatacaatacaaggaactggcgaccagatgttggaatagaccgcggactaggatacgaggtaaggtggattcacttttcgagcttaaggactaattactttgcgactgatgcgctgggattctggaactgagaaaagcccagctggacgtaattggccagagatccgggcatattggagtcgggagcttgtgtgatcgttattgtgtttccggccagatcctgggtagtcacaacatgcattacctgggccggtggctgctgtgtttgcgtctgctgagcagaacgttcttgtttgatttcgaaaaccgccttggatgcgatgagaggtcggattagcacttttaaaatatgaatggtattacggactcaccttattgggcacctgaccattgcttcgaacgtgagttagcgcaggtgctgctgcaggcgatgcagttgcacccggagccgcgctttccggtcgaattttcttatgcatctcccgatgcttctcgtagtgcaacttggtggcaaagtttttgttgcaaacatcgcaacagtataaggtttcggttgatgtctgcgtgtgaattctgaaagaaaggatatttatgaatctctgttgaatttaactagatgtatataaatgctgaccgcctatgcttattcaggttatcctttcgcgagaagggctttttgcacacctcgcacgtgtacatcttttgtccagaatgggatactaagtgccgggacaggtgctctttgcggctgaaggtcttgtcgcaaccctcttccgaacacttaaagggtcgcaggcccgcgtgcagcttaacgtgttgggtgaggtgttctttctttttaaattcacgcttacaggtggggcatatgaggccagaagttgtgggcgcttcgctcccagaatgggtcgcgttctgtccttcctgctgtggagaaggaaggatctgctgcggcggtcgcgctgctttaactttctgccctgaagtgtcctggttctcaggaggcttgcgtacgatctttttatgctgcgccgccagcggaggtggttgtgcttggcttagggcgggaacggacacaggaatcggctgtgaagcaggagttggggatgtagtagagggcttactttgcgcctttggcgctgtctgcattgagattcgactgattgtgatattctgtttgttcagcatgggcagtttggcgggattagatgtgggagctggtgccggcaaagaagcaggctgcttgggcaccttggtgatcgttgtattcgaggagagccgctgcatggctgcttgatttgctgatgtcgctgtcggggcgcctgacgcagagagtcctgcggtctgctgttgcttcacctgcggttgtggctttgtctgggttatcaatcgcttgaactcgttggtggacgtgccattgcttccacctgaggacggccccacagtagttttgctctttggcgatggcatcggtttttgctttggagaaggcgttttaaaagtgggggctttcttgctgctagtgggcgtggtgggagtcggtggaatattggtcacattccgtatcaccaactgcgaattggtggtgctggtatgtggagatctaataatttgctgagaggtcacttgtgccgtatttggaagttgggtaagcggttgttgcggcgccagaaattgattttgcgtcaccgtagtgccctggaaggcgcttcctggattgcccaatgtttgcggtgtcagttgcagagtagccggaattgatgttggtgtcagctgcatgattggctggccatccgcagtggccagctgaggctgaagtttcatctgtacttggtatgtcgtgggcaacactaggttcttggtgtctatgtgcgccacgatctgctgatccgaattctcgtcccgaatggtgataggcagaaagcacttgtttggtgacagcaggttggttgtcgactgcggacccgccaggctggagagcagggcagcagcatttagctgcgtctgggcaggaactgtccctgcacttgtcactcctccgctacctggcatcaactgcagctgtatttgcggctgactgccaccgaattgcggcattgaagtggtgaactggggcgctgtaggcgaagagagcacaaagttcaactttggctttttactgtcgccagaacttgacgtatcatcctgagcgacggagtactgtgtggtagcctgcagctggttggtcagttgctgtagttgttgctgaagctgaagttgttgaatctgctgccacaaaggctgcagttgatcgcctagctgcggttgtaactgcaactgagtagggtttatggtaggcgttactgtctgggactgcagagaatgttgctgctggggcttggcaggcgatatgggctcctttttccccagcggcgttatcttgatgtcaggcttgaggcgtataaactcttccaaagcactaagtggatagaatgttattgagatgattttcatgaaagtgaattcccactcacgtctgtctttcgctttttatttgaacttccggcatagcttgatgctgctgctgctgctgctgtaccccgttgtccatcgttatggtgtactgctgctggggctgcatgtttaccgcctggattatgctgttcaagagatttccggactgctgagctccattaggaactggtggagctgactgcgccacactgaggctcttcccagtttcatcgaccgcatcccgaatgtatagcttgtcgctgcttggcgccgggcgaatattgagacagttgtttagcatggtctgtgagttacggcaagtggcgcgaagtccgtggatttgctccaccaactgcacacactgggcgcacaccactttgggcaagcgatccttttcatcgatctgcaagaagtatgggtttgttagccaaaagtaatgggagattgatgcactagcacgacctgcagtgagagacactcgagtatcttttggctcagattcttggcgcgtccctcgggtgagtagatgttcgtcttgtgatcgctgctgtccgtgcagatgcgacacaggtcgtagtagttaatgcagcgaacgttgcttccggccgcagccatttttccggtggctcagtggttttcgaaatgctatttatgtttagtgtattgcacatgcaaatatttgttgtcttttcttcgactgaacgacgcttagtggtgacactgcgcgaatacattgcagctcggcgtgattggcaataactatcggtaaattataatataaatgaaaggaacgacattatgtttaccctgccttataacctttaaccgaggaaattccacaaacttcttaatttatttcattctaataacttattcattctaattcccaactaagcgaagtaagtacttacagggtagctatcgatataagcaacgaaacttccacctatagtttcgtatcaacgttataattatcgataactactgtgcacccaagggatttacccaactcgaactaacggtcatactgcgtcggccatttgtcattgtgagcgtgacaaaaataagttctctgaaaatcgaaatagatcgaagcgtctgatttaaactggagaaaatgggatcacgcaacgagtgccgtatatatgtgggcaaccttcccccagatatacgcaccaaggatatccaggacctgttccacaagttcggcaaagtaactttcgtcgatctgaaaaatcggcgtgggccgccatttgcttttgttgagttcgaagatgcgcggtgagtaatgcgaatacacacagctggcccagcgccccggctaagacacccaactaattcgcgacaactgcttctcttccttccttgaccatggtccatatcctccggctgcctcttggcccaatttagggatgccgacgatgcggtgaaggcgcgcgacggctacgactacgatgggtatcgtctgcgcgtggagttcccgcggggcggtggtcctggaagctaccgcggcggcaaccgcaatgaccgaagccgcgacggtgggggacggatgggcggacgcggaccgccagccaagcgctcgcagtaccgcgtcatggttactggactgccc

SEQ ID NO: 42443 - DNA, 2778 bp, DROSOPHILA
atggctgcggccggaagcaacgttcgctgcattaactactacgacctgtgtcgcatctgcacggacagcagcgatcacaagacgaacatctactcacccgagggacgcgccaagaatctgagccaaaagatactcgagtgtctctcactgcaggtcatcgatgaaaaggatcgcttgcccaaagtggtgtgcgcccagtgtgtgcagttggtggagcaaatccacggacttcgcgccacttgccgtaactcacagaccatgctaaacaactgtctcaatattcgcccggcgccaagcagcgacaagctatacattcgggatgcggtcgatgaaactgggaagagcctcagtgtggcgcagtcagctccaccagttcctaatggagctcagcagtccggaaatctcttgaacagcataatccaggcggtaaacatgcagccccagcagcagtacaccataacgatggacaacggggtacagcagcagcagcagcagcatcaagctatgccggaagttcaaataaaaagcgaaagacagactgctttggaagagtttatacgcctcaagcctgacatcaagataacgccgctggggaaaaaggagcccatatcgcctgccaagccccagcagcaacattctctgcagtcccagacagtaacgcctaccataaaccctactcagttgcagttacaaccgcagctaggcgatcaactgcagcctttgtggcagcagattcaacaacttcagcttcagcaacaactacagcaactgaccaaccagctgcaggctaccacacagtactccgtcgctcaggatgatacgtcaagttctggcgacagtaaaaagccaaagttgaactttgtgctctcttcgcctacagcgccccagttcaccacttcaatgccgcaattcggtggcagtcagccgcaaatacagctgcagttgatgccaggtagcggaggagtgacaagtgcagggacagttcctgcccagacgcagctaaatgctgctgccctgctctccagcctggcgggtccgcagtcgacaaccaacctgctgtcaccaaacaagtgctttctgcctatcaccattcgggacgagaattcggatcagcagatcgtggcgcacatagacaccaagaacctagtgttgcccacgacataccaagtacagatgaaacttcagcctcagctggccactgcggatggccagccaatcatgcagctgacaccaacatcaattccggctactctgcaactgacaccgcaaacattgggcaatccaggaagcgccttccagggcactacggtgacgcaaaatcaatttctggcgccgcaacaaccgcttacccaacttccaaatacggcacaagtgacctctcagcaaattattagatctccacataccagcaccaccaattcgcagttggtgatacggaatgtgaccaatattccaccgactcccaccacgcccactagcagcaagaaagcccccacttttaaaacgccttctccaaagcaaaaaccgatgccatcgccaaagagcaaaactactgtggggccgtcctcaggtggaagcaatggcacgtccaccaacgagttcaagcgattgataacccagacaaagccacaaccgcaggtgaagcaacagcagaccgcaggactctctgcgtcaggcgccccgacagcgacatcagcaaatcaagcagccatgcagcggctctcctcgaatacaacgatcaccaaggtgcccaagcagcctgcttctttgccggcaccagctcccacatctaatcccgccaaactgcccatgctgaacaaacagaatatcacaatcagtcgaatctcaatgcagacagcgccaaaggcgcaaagtaagccctctactacatccccaactcctgcttcacagccgattcctgtgtccgttcccgccctaagccaagcacaaccacctccgctggcggcgcagcataaaaagatcgtacgcaagcctcctgagaaccaggacacttcagggcagaaagttaaagcagcgcgaccgccgcagcagatccttccttctccacagcaggaaggacagaacgcgacccattctgggagcgaagcgcccacaacttctggcctcatatgccccacctgtaagcgtgaatttaaaaagaaagaacacctcacccaacacgttaagctgcacgcgggcctgcgaccctttaagtgttcggaagagggttgcgacaagaccttcagccgcaaagagcacctgtcccggcacttagtatcccattctggacaaaagatgtacacgtgcgaggtgtgcaaaaagcccttctcgcgaaaggataacctgaataagcataggcgaattcacacgcagacatcaaccgaaaccttatactgttgcgatgtttgcaacaaaaactttgccaccaagttgcactacgagaagcatcgggagatgcataagaaaattcgaccggaaagcgcggctccgggtgcaactgcatcgcctgcagcagcacctgcgctaactcacgttcgaagcaatggtcaggtgcccaataaggcggttttcgaaatcaaacaagaacgttctgctcagcagacgcaaacacagcagccaccggcccaggtaatgcatgttgtgactacccaggatctggccggaaacacaataacgatcacacaagctcccgactccaatatgcccggatctctggccaattacgtccagctgggcttttctcagttccagaatcccagcgcatcagtcgcaaagtaa

SEQ ID NO: 42444 - protein, 925 aa, DROSOPHILA
MAAAGSNVRCINYYDLCRICTDSSDHKTNIYSPEGRAKNLSQKILECLSLQVIDEKDRLPKVVCAQCVQLVEQIHGLRATCRNSQTMLNNCLNIRPAPSSDKLYIRDAVDETGKSLSVAQSAPPVPNGAQQSGNLLNSIIQAVNMQPQQQYTITMDNGVQQQQQQHQAMPEVQIKSERQTALEEFIRLKPDIKITPLGKKEPISPAKPQQQHSLQSQTVTPTINPTQLQLQPQLGDQLQPLWQQIQQLQLQQQLQQLTNQLQATTQYSVAQDDTSSSGDSKKPKLNFVLSSPTAPQFTTSMPQFGGSQPQIQLQLMPGSGGVTSAGTVPAQTQLNAAALLSSLAGPQSTTNLLSPNKCFLPITIRDENSDQQIVAHIDTKNLVLPTTYQVQMKLQPQLATADGQPIMQLTPTSIPATLQLTPQTLGNPGSAFQGTTVTQNQFLAPQQPLTQLPNTAQVTSQQIIRSPHTSTTNSQLVIRNVTNIPPTPTTPTSSKKAPTFKTPSPKQKPMPSPKSKTTVGPSSGGSNGTSTNEFKRLITQTKPQPQVKQQQTAGLSASGAPTATSANQAAMQRLSSNTTITKVPKQPASLPAPAPTSNPAKLPMLNKQNITISRISMQTAPKAQSKPSTTSPTPASQPIPVSVPALSQAQPPPLAAQHKKIVRKPPENQDTSGQKVKAARPPQQILPSPQQEGQNATHSGSEAPTTSGLICPTCKREFKKKEHLTQHVKLHAGLRPFKCSEEGCDKTFSRKEHLSRHLVSHSGQKMYTCEVCKKPFSRKDNLNKHRRIHTQTSTETLYCCDVCNKNFATKLHYEKHREMHKKIRPESAAPGATASPAAAPALTHVRSNGQVPNKAVFEIKQERSAQQTQTQQPPAQVMHVVTTQDLAGNTITITQAPDSNMPGSLANYVQLGFSQFQNPSASVAK

SEQ ID NO: 42445 - DNA, 7862 bp, DROSOPHILA
cccagagcaatccccataagtatagctcaagaatgttaaatataagccttagatctttaaaatcggagtatgaatagggcgctggatacgacctactaaacttcctggtctgatttaagcatgacctaatgaggtatttaatttgcctcgagtcatgctgaaatttgcatacaatggaatatggatatttgtaaatggcacgatttgataaatatgaaagtagctgcatgccaaagcttgccccacaaaactatcgcctagatgccaataagtcgattgctagcatttaccttttacagaataaatgaccaaaaacctggccactaacgactggcagatgcacacaaaaaacatgctgctaaataaaatttcagttttagtttaattttattttatttatgtataagaaaagatatcaagaaacaacaacgaattttgcgcaagactggtaaactaagtcattgaaacttaaatactgtgacttttatcttttggaatacctatctgttttcgaatagatcttcatacattgtgccacagtgcacggtcttattcatggccaataaaggcagatggggtcatggcgtgctgatgtatcttcggctgaaatctcgagttccttcaacgaggaaaacaacacggatgtaatgagaacgtccactgatttgtttgacttggctagtgcaatgcgctgtagaagatcgcctcaccattgtttgaccaagtgcttgatatcttcatgccggaacagcagagcaacgtgggccatcgaaacgcctaactggtttctgctgtttctgcctcggagaaagcttcttgccggtcacgcaaaagctgtcttaactaaaaacagcgtccaagttttgagaacttttcagccagctagccgagaacgagcggaaaaatcaactaacgctcgcagatgtgaaaaatcgcgatcgcgagtcggctctcacgttggcggcagcagcccgcgttttcagtcgctccgtgaaacccgtcgcactcacatcgaaatcgcgcgcaagtcgtcggatccaaatcgcctcgaaacgctacgcacttggaggaggcaaatatcaaatatatgagaataattagttaggaggcagccgaatcagcggaatcaaatcgatttccctcgactgcatttagcagtgctgcaccatcaaatcaaaaataaattagaaagtgtaagtgaatatatggctggctgccaggagactgacattatcagcggagaaatgcaggcagttggcagccgattgggcggatcgggagatcaatcgatcgccgtcgcatgcaaatcgagtgataaacgatcgcctcgaaattgaaataacaggcgagcagctggcccccggaggtggatacatatgcatatgtgtgatcaaacagaagtgtttctcggggaagggcggcgtgaggagtgggaggagtaggtagcccccagtagccatatactcatatacctatctatactatacagccagttacccgacttgaggcgcgctcgtctgccttgcggttgtatgtgcttatttatacaaaatatattcaatttcattaagctgtcgctgctggctggccgtccagtaatttcaatattcaaatgatcgctgatagctaaaccccctgacttttttacttttctgagcgcccgcaaaagctgcggtaaaattgagaaaaccgcagcgtataaataattggaaaacaataatgccactgtttgatcgctgacccaaattggcagagaaaatgaatgcatcttaatgaaaacagagtcagtctgtttgctgcaggcatagcgatctatatagtcgatgcactcggtgatgtcagaattgcgaactgacattgaaagtctgcgaacggcgacaacctgaaagccttcttctttgcctttttggggacctcaagttgaacacgttgcgagtttagggataagtgggccatccagcccagtgttcaggtgtgcgggggcgtatacgtaatatgcgcgcctggcatacatttcaactgagccacattttggctattcgcctcagtcgcgaaccataaaaatcacatcaaagccccaaatgaaagcgtcgttcattgaatcttaagtggccactcctcctgggaagtaattataaagggaaataaacggtcttcaagacaaaactgtttctaatccatccacatttggcaaagttcagtgacgcgcatccacttggaagcagtgaaaaatgaacaatgtgaaggttactcaatttacaaggcaacagataacgccaccaaattttatttgacaaaaaatattctggcagaacaagccaaggcgttcgcacacctacgccatacgagatggcacatgggcgtagaattctcgacgaacaggtgttgaaaatcataaggtggagtcccattcctgaccccagacagccactgatcagagattgtgagagctgttccaaaagttccaccgcttttgtcgactctctagatttctagttgctcgcgaccttgtgatctattaataagtgtttcgtgtttttatatatgaatcattttgatgggcgatctgtttatgagttaactttcgtttggctgggaaaacgaaaagcccaaaatccgaaagatccccgaaaattgagtttttgatcgcgtccaatgtcgcggcttcattgaccctgaaaactatgtagtgtcgacagaacgaaaagtatctcatggatgcgcgcacatttgtatcttgcgtctaaaagacgccgctgccactagtaattacaaaatcttgttcggcaaacggaaacttcaaaggctgcaattgagtttgcagctgcaacggttttaattgatttatatggcaagtcgagtaatgtttaaaaagccgcggaaaaaagccaatttgacaaaaaatcaaagacaaaaagtcaagtgggagctggaatagcagaaataaaaaaaacaaaaaaaaaacaaaaatgcggcgtgctttggacctgtcaaatttggtagaacgatttctaccggtttcaaatggacctaaataaatgaaaaaaaaaaacagacccggccactcaagtgagctcccactttctgtcgaagattgtagattgagcaatttccagccacatacaaaatgactttgtcttttcgataacttttgtgcctggcgcaaaaagtagcgcagaaaaatgtcaaacttaattacgcgttgaagcgcaaactaattgccgagtggatttgcgggcttcagcgggcagcagggtcacaaaagttcgaatggcgataaagtcgacaacagccaaagccgagaataattggctttggctccgttttgcggcccacgacaacagataatagccgcacacaaaaaagtatctgtcagatatacatatttaaaagctggacacgtgctcattgcacacgaaaattagcatttacttgtggatcgaacccattttccacaagcataaaggcaatggcaattgaaatgatttatatgagcattatttcacttcgctttactagacaaatgggtcagcttatggttaatgggatacgataaatgattacttgtgtttttataatttgaattttattgtaaatacttgtagttaaaataatttgtattataaatttttattgaaagttattatctcatataaagtaataacaataattacaatatgactacgttctgagaccattctactatttcgtggtctgacccacaaattttgcagcctgcggtaaatgttttttgttttccttttcttggcttgcattttctaaagccactttctaaaataaatataaaatattgatgtattccatgaaaaacgtcaaaaattcatgcttgagtaagtgcattcccaatgccttttaatttgtttgtcgacaaactttacctttcacaaaaccggcagcatccgccacacttttactcccacaccatcacacttcagacccaaagcaactccatccagctacgtagtgcacgtccaactgcccagttgcacttgtcaagtcagaagactttccaagactccaagcctacgtcaagtggaggcacgaattcctcggaaagagtcgcccacgccatggcttgaacttgactccaaaagctgcgagtcacgcctatatatacatatagtaaaaccactttgtgtgaggcgagcggaagtcaacgtcagcattagatgagttcattgcgaatattaacgccattaaacgaatgagtgggctgatcgcttccatatcgaggttgtctacccctttccactgatatggagaagtctctaattgttcgccgaggtctaaagtatcttagctttacttgggtttgttcttctaaccaggtcaaaacagcgatatcgcattgccgcagaaagtaacccaagacgtttgtctgagttgtagaaaccagacaaatgctttctgctcggatctgtatccaattgaggtaccatttataaacagacgcaaacgtggagatcgtctgagttaaaaacccgtgcgaaacgcgtgtaaacggcatgttaatgcgccatatgtccggtttatgagccccgccgccagtttgtgacgaaactataaaaaaaagtttttgaactgctataatttaaagaatgtgatgtgatcttcggcacgcaccctcaccgccgcccctgataattgcgcaatttgtataacacttctgttgcccagattgttcgcatctcttcactgtgttgttgtaggtcgtttgaggtgtgaaactcagcggaaatgggctttacatacaaatggtatctgtaaatgtatctgtatctgttcgctaaactttagttgtttgcccaaggcatttcccagccagcctttctataatgactcaaagcgtttccatgtaagacaagatattttggcatgtgattatctcatccaagaccgccgtgagccacatgtatacatcagatatatcacatggatacacaagtgcccgcatccaatggatgcaaaccagctgcagcggcatttgcaagtgccaacatgcgccacatcaatctgcagccggtccgaggcacgttgagcgtttgattaatttaatgacaatgcccggtggcgctatttcgctatctggatagatgggtgcaacccacatatgtatactcgtaccagttccgccgatcgtgtgcgcatgcaccgatgatataaactttcccaagctcgccatctctactgccattccagctcgaatccctgaaggaatagtacgattaaattagtcattcgtgtcgttgatttattttagagcttccataaatataaagcttacgtctttcaagtatttcacgctttctgtccattgttttctttgtttcttctatttttaaagcacatttgtttaataaacatttattttttttgtgtgcttgacgtcacaactggtaaaactgtggaattttaatgttgtagtattggttgtctttacttttgcaatagttcggatatttcaattaagttacaaaacatatctttgtctagttttacatgagtatatcgagaacttactcactattctattgctgtgtttttattcttttaagttatatgtgttcaaaatggtacttgaaattgatgattgtgtttcttaatattttcagctggtaatcacaatatagatttgccaaaatgccgaagccactgttaaattcgtgctgtctgtgccaatcgacccggaatggctccgttatctcgggcatactggcgatagtcctgtcgatcatcaccatcgtggtgatcttcacgacgcgggtgcacttcaagacgataatctttgacttcatccccaatgacattgttaagataattctagtcatcaatttgtgcatgacgatcttgatatcgctgctcatgatcattggtgccctgaaggtgtgtactcagctaatttaattaaatgcatacaataaaaatctatctatgttccagcggaaccactacctgatggttccatgggtggtcctcggcattatgattgccatcggtctgctgatctccgtcatctacacgggcatcgtcttcttcatcgacggctacgtgctgacgggagtcctctggctgatcttcggcctaattgtctgcggtaagtgcactccctcttggttggtgaaaaatgggtgagggggggggggggtcttgctacttctccatgtgcggtttttagcaccggatgacggttattgcgagccgtttttaatttatagacgcatttatcatgccatgattgcccgtgtgctgaaaacagaagtgccccggcgccgcagactagaggattttggaggtaacttgccgggtggtgcaagcaaatgaggcgcaaagtggcttgttgaggccatttgtagaaatgtcagctgcagaactttgataggagtttattgggaaagctatacgattgttaaataagctcattaaatgaatcaaacaaatttaattgtattaattcagcggtataaaagttaaagaaccgaatcacattgtgaatgcttcaggtttatacatatattcctcgctttttttttacttttgaaaaatgatatttttcaagttttacaaatttgcatattaaatttgataaaaattaagtgcttaccgaaaatgaaccacatacgagttaaaagtcaatttacattacatcgtgtaaaatcggatgcaattcatgtagaatataaaatgacagcactcttttgcgcgcacatgccctaacccaatgttcctcctccatctttcagcgattatgacctattgctggtgcgtggtctatagtgaatacgccaacctgtccgaggagaacgagcgcggtcgttacaacaagcagccgtaccgtcgctagaatctccaggagcactattcatcagaaattgcattcaagaagctgaatccaccacccacacatcttcatcctagcttcctatgttcgtttttagtgattatgtctaactaataattataatttagttgaggcgagccagcccttcgctcacatcgaatttacgcggcccgtggcattaagtgcaatggaattatgtatttaacatttaaataaaactttaatccagatattatgtgaatttctgttgtaatttgtacgtaatacttgtaattgtgaaagaggagttcaaaaaccgaaaactaataacaaaaataaaaacaaactatttatcaaccgtttgagaggacgaggtcttgtgtgtttgttgttttttatttcaaaatataggttttatctttaggcatatatagttatattcaattctctcaaagtctatcaaaattgtaaattaactaaaaatatggatgtgtagggggcgtttcatgtggttgttgttttagctaagtgggcgtgttccatgtaactacacaagtaactgactgcgctctacagctcgctgcgcgagtacttgggcttcagctcctcgatacgcttgatgaagtcgcccttctccaggcaaccgtcacagctctcgtcccagtcgttgaggattttcttcaggtcgcgtaccttcagcttcttcaggtccacgctgttcagatcgatttgtttctctgcaatgaacaatccacataaataaatgtttatagaagtatattaaggcgaagagcagcgacagaaaagctaaatgttaagccaagttaagagtttttgtttctaatagacaccctagattaattgactcttagtaaatgacgattaacgttttctaataatctaaaccattaacattcattttacaaacagacctatctcataaaatgtagaattttatgcgagttaccacaaaataatttaacaagctatgatataatagtaaagcatacatgcgaaattgtat

SEQ ID NO: 42446 - DNA, 719 bp, DROSOPHILA
tcgcactcacatcgaaatcgcgcgcaagtcgtcggatccaaatcgcctcgaaacgctacgcacttggaggaggcaaatatcaaatatatgagaataattagttaggaggcagccgaatcagcggaatcaaatcgatttccctcgactgcatttagcagtgctgcaccatcaaatcaaaaataaattagaaagtctggtaatcacaatatagatttgccaaaatgccgaagccactgttaaattcgtgctgtctgtgccaatcgacccggaatggctccgttatctcgggcatactggcgatagtcctgtcgatcatcaccatcgtggtgatcttcacgacgcgggtgcacttcaagacgataatctttgacttcatccccaatgacattgttaagataattctagtcatcaatttgtgcatgacgatcttgatatcgctgctcatgatcattggtgccctgaagcggaaccactacctgatggttccatgggtggtcctcggcattatgattgccatcggtctgctgatctccgtcatctacacgggcatcgtcttcttcatcgacggctacgtgctgacgggagtcctctggctgatcttcggcctaattgtctgcgcgattatgacctattgctggtgcgtggtctatagtgaatacgccaacctgtccgaggagaacgagcgcggtcgttacaacaagcagccgtaccgtcgctag

SEQ ID NO: 42447 - protein, 165 aa, DROSOPHILA
MPKPLLNSCCLCQSTRNGSVISGILAIVLSIITIVVIFTTRVHFKTIIFDFIPNDIVKIILVINLCMTILISLLMIIGALKRNHYLMVPWVVLGIMIAIGLLISVIYTGIVFFIDGYVLTGVLWLIFGLIVCAIMTYCWCVVYSEYANLSEENERGRYNKQPYRR

SEQ ID NO: 42448 - DNA, 3049 bp, DROSOPHILA
ctgcgttgcaaaactttagttgttattaaaattgttgtgttaataatttagttgtgagcaaagtatagttttgataactttaattcgtgtagatttattagtcaatttagttcagtgaacaaaagaataaagcttttggaacttcaatttaagtagagcccgtatacttaattataaattaataaaaataattatggtttttaatttaaccataactcatcatttgcatgtgtacttaacatcggtccacacaattctctttgtagaaaataactgattagaaatgccgcgcagtacatgcttttattaactacatgtgacagaaaaactcatcaatgatttgattttgttttgtcagcataaaaaatggtttgatttggcgcccgttatttacaatttaaataagagcttttgcatttttggccgaaaaccttgctcgcgccatcagcgctgattgcgagtcttgagctgtggtcgagtgttgttggcgctaagattgaccttaaaatcggattttttgttttttttttttggtagggatggtgtgtcaaatggacctccagctgtccgctggcaagctaccgagtgatgatactgctggtacggtaatgctgcttctgtggcatcggcaagtcattgctcacccaatttcaaaatattaataactcacacactgatgcacgaaaaaatggggaaaatatgagtaaaaaagcttgcattaaatccgatctaagacaattccattggcattcagcgtgtggctcaaatttcactaatcaccaaaccttcctcaatcactgccccctctgtgggatcaatcatccgatcgatcgaattcgggtttcgaatgccgcactgaaggtcgccctctatcgattcgtcttcggcagctcgaagatgaattacatttacatttcgttactgtaattgctaacgaattgcaggcaggaacccacatgatgtattacaaatacacacacaacacacgatcaaaatatctccctgaggtaaaggtcatattcaagtgaaattgtctaaatcgaattttgagtcagttactactttcccacatacacgggaggttatcagaacttttcgaacaactgaaaaatcggaagtcttgaactcaactagaaactttcgacgcagttgtagtaattacttttgtttagggagagctagaaactttcaagcaccaacaccatgaacaccaacaccatcaaccctcaggacgactgtagtaacatctccaacaaggatgtagagatcgatcgggaccaggagctccagacatcatccgaaatccagacaccggaaacaccgcagacagggcggcgcaaaaggatggacacgcccattcgagtacgtgacatgatcaacctttacaactttgccactcaaaagaaccaggaactggagatggccaagtccctttactttggcgccatgtcagaggaaaaccagaggacggatcttgagggcggtagtagcctttgcaacatgtccatgtcggacgacaaggaaaaagaaaagtaatagtttaggcgcgccttttacacttcctcgactaaccagtcaatctaactacagtgagagtatcctccgagtgaacaaggagtctgcagtcttccaatcggccaatactgagcttccgtctgatccgaatacagtagaaaggtcctatcaaagcaaaactacaattcgacacactaataaaggtgggtgaactataaaataatttacataaaaaataagattagcccatacagaaaatgtatatataacttaaacttatttacaatttttttaattacatttttctattattttcggaaaattaataatgtttccttcaaaggcgtgcgtataatcatcgacatattttttgataaaaaagatagcgagatagacatagtgggcagccgcgtggagacggacatccccgagagccgcatcctgtccgatttccagcagcattcgctggacatgaagaaccaggagctaaagccggggatccaggatggatcgagtacccccaagtccgcgtaggctagtcccaggtatccaggagataactaactaaattccaggttacaaggtctacaaaatgtttatatgtatatgtgttattttctttatttttgaaaacagtacaaaacaaaccaaaaaaaaaggaagaaaaccatcgattgactcccgacactctcgactttagcttcctctcagttccatcacgaaaatgaaaatggctaaagtggtaaaggtgaaggggaaaggagggggaatggatgggtgaaacccaacgcccatcgaaaatgaaatccagcaactgaatggggcaacacacgactgcgatgaaaacctcagtgccccaaaccgccttgtctgtttttctgtcttttccgcgacaaaagggctttgaggagtaaataaacgatttgaatcgaaaaacgaagatgaaaatggaaaatggaaatcttcgcttacaaaacccagccgccagaaatctgacaacgatgccgccaaaaaagccagccgaatcgagcaaatctgagatggggaaaatgatttcacaatttggcgcccaatctggtgcagatctcttttagccgtgctcgattgctctatttagcccacttcttttgttgcccccttacccatctgccaaagtggctttaacgtaaacgttccaataaattagacaaataaacaccggtgggtgaagggttgccctaaacggtggcattgcaaatgctaataacgtgcaatgaaaatgaaaacgtagcagttaacggtaaattgaaactgagaatctagctgaaaagctgaaaaactgaaaatgaagctgcaatgcaaacgcttcgctggctgaggggctcaaaaaacccgattgaacttcgttaactggccgagaagttttggcacagtggcataaaatgaaccaacttatacagcctcataaataatgtgctttaatatggtttaatacctaaaagcggctgctaaattccaaacttacatcatttggcaagattatttgcccgcatct

SEQ ID NO: 42449 - DNA, 812 bp, DROSOPHILA
ccctgaggtaaaggtcatattcaagtgaaattgtctaaatcgaattttgagtcagttactactttcccacatacacgggaggttatcagaacttttcgaacaactgaaaaatcggaagtcttgaactcaactagaaactttcgacgcagttgtagtaattacttttgtttagggagagctagaaactttcaagcaccaacaccatgaacaccaacaccatcaaccctcaggacgactgtagtaacatctccaacaaggatgtagagatcgatcgggaccaggagctccagacatcatccgaaatccagacaccggaaacaccgcagacagggcggcgcaaaaggatggacacgcccattcgagtacgtgacatgatcaacctttacaactttgccactcaaaagaaccaggaactggagatggccaagtccctttactttggcgccatgtcagaggaaaaccagaggacggatcttgagggcggtagtagcctttgcaacatgtccatgtcggacgacaaggaaaaagaaaatgagagtatcctccgagtgaacaaggagtctgcagtcttccaatcggccaatactgagcttccgtctgatccgaatacagtagaaaggtcctatcaaagcaaaactacaattcgacacactaataaagatagcgagatagacatagtgggcagccgcgtggagacggacatccccgagagccgcatcctgtccgatttccagcagcattcgctggacatgaagaaccaggagctaaagccggggatccaggatggatcgagtacccccaagtccgcgtag

SEQ ID NO: 42450 - protein, 202 aa, DROSOPHILA
MNTNTINPQDDCSNISNKDVEIDRDQELQTSSEIQTPETPQTGRRKRMDTPIRVRDMINLYNFATQKNQELEMAKSLYFGAMSEENQRTDLEGGSSLCNMSMSDDKEKENESILRVNKESAVFQSANTELPSDPNTVERSYQSKTTIRHTNKDSEIDIVGSRVETDIPESRILSDFQQHSLDMKNQELKPGIQDGSSTPKSA

SEQ ID NO: 42451 - DNA, 21409 bp, DROSOPHILA
gcgccataaacgtttcgctgctcgtaacgccacaacgctcgacgtttcgcagcggctttgctttcgcttctcttctcgcgcgtaaagcggtctccccaaaaaaaaaaaaatagaaaacaaaaaatataaaggaaaaccccctccgtagacagacaaaactcaaagtctccaacgactcaaagcgcctcagtcgctgccgctctgccgccgtttctgtcgacgccgctgcccgcgctggcagcaagaattaccaattacacgaaatttttatactcttttaaaaatttcgttttattataatatttattatcgtggcgcgcagtagtgtctgcggaactcagctctccactctttggaatttcggccctccgattccgattcggattatacgattatacgactatacgactgtagtgcggcaatacgattcagtttccgattcgccgtgtttattgttccgtttcggccgccggcttattgtcacttaaatgttatagatcgcgtaaaatataataaaattgtgtgtgaaatttaaaaccgaaaaaactgtcaaaacactatggtttataactcactgtgtgcggttcgtaaaaattaaaaagacataaagttgacatcgtaaaaaggttctcgcctctccgttccagacttcgatagttctacctgcaaagtgttttatgacattttaaacaaagtaattaaagcaaaacgttgggagaaagcatttctccggccacacacacactcacgcacttgagaagtcgttaaaagccgcaggaaactcactctgccataaaaatacaagagtgccattaaaaaagatcgcgcgcctataaatcacacgtacgaaatcccgccggcacgacgtccattcgaatttccgcgtaattgatgaccgcattttaattgcttttacaacaaataaaagatacacacaccccaaacacacacatgcgacacacacacttgtgccacagctgcaaatacaacgcaacccgagaccatatgcaaatttaacaaatttcgttgtgaattcgccagcttcgagcgaaaaaagtaacagaaacagaaaagctgcaaatacaagctgctcgccaaaagttcgctagagaaaacttgagaaaggtaacaaaatgcatttcacttctcggaatcgagaaaagtagcttaaagtcgggcagctggcaaagtttccgaattctgtctcactaactctatctaaaaagtactaactgttggccatctcatatagtactgtaaaagtaacccacatactaactcgttggcactggcagggaaatctagctgaaaaatatataaagcatttggattatatatttttttcacttgagttctgtatcatgctacccgaaagatttatgttcaatccaaacatattcaatttggttaatgttctttttatggtttccgagtaatttttataaacatgttatattttttgttttgccatttttaattcttgtttatcacattggacgccaagtttatttttgtttttagtaccttttaattcgattaattttgttagtgatttatatactaagtccaatgtagtttgcattcgattatgaagtagaaaagttaaatacagagacgggagatgttcattaaagacaagtaaattttaatagacattgatacaaattaaattgctgtgtaaatcttatgaaaaagttaaagaaaaagatatttttaaaatgctatttctcacagtgttgaattataaagtcattcaagtttaagatttaggttgtgcttacagaagtagtcggaacttttgttttattatggctagaaagcgctcctctccacgctgaattcaaacaaaatttgttaaagtcacacaaagaggaaactttaaattataaaacgaaatactcaatctagccattaaccaaacgactcagataaagaacccaaatcattcgaactcagaaatctccgaaactaaaatagaacaacaagtggactaaacgaaattccgaagatccgatcctcggccagagagcaaaatatgtgcaatgtcaaaatttgttttcgatagtatgctgccaaagtatccacagttccagccgtttatcagttcgcaccacttaaccaccacccccccgaattcgtcatctgcagcagttgccgccgccctagccgccgccgccgcctctgcatccgccagcgtttcagccagcagcagcagcaacaacaacagcagcaacacgatcgctggaagcaacacaagcaacaccaacaatagcagcagcagtccaagcagcagcagcaacaacaacagtaatctcaatttgagcggaggatccctatcgccgagccatttgagccaacatctgggccaatcgccccactcacccgtctcctcatcgtcgcccttccagcagcaccacccacaggtgcagcagcaacacctgaaccaccagcagcagcaacatctgcaccaccagcagcagcaacaccaccaccaatactcctcgctctcggccgctcttcagctacagcagcaacaacaccacattagcaaactagccgccgccgcagttgcctcgcacggacacgcccaccagcaactgttgctaacgcccccgtcagcgggcaattctcaagcgggcgacagcagctgctccccatcgccctcggcatccggtagctcctcgctacaccgcagcctcaacgacaactctcccgggtccgcatccgcgtccgcctccgcatccgcggccagttccgtcgctgctgctgcagccgccgccgccgctgcggctagctcctcgtttgccatccccaccagcaagatgtatccgtacgtgtctaaccaccctagcagccatggagggctctccggaatggccggcttcaccggactggaggataagtcgtgcaggtaagatagattgccctgtttaagtatgggataatgcagatttttataaatcgggatgggttttatgtccaatcgtagtaaaatgatcttaaatgaccctaataggaagtgcaaatataaagtcaatgacaaatgatctatactatctaatatgatattcaaatatttggagtgcattgatagaacttctcagacagtatcatattttaaaatatatgcaaatttagtatgaccattagctttacctggcttcaaaacctttaagaagatgtttccggggttgaaaatacaaaaaaaaagaaacactcagctcttccaagaactaatttcgcgtgctctcaatttggcgagcggaaatgccagtcgagaccttcagtaaaatctgcaaacactgcaaaaccgcaaatccgtttcgaatgcgctctaattatcgggtctcggatcctgggactctgtccattttcctctcggccaccggccattcatattgaatggccataaagtcggaaaattagagcagcctgtggtggccgctggcaatttgtcgccggccacaagattcgcacgcacgctgaccttccgctgcggccatttgcatattagtactactgtatgggcactccatgtgcatgtacagtgaaccctgctgtgcgtgggcgtgttcgggattagtgtgcaattagagctaaccgcagtttggtgaaaggggcatgcaaatggccacctcattagcatttgactttagtacgggcgctggagttgggaacgtactatgagagcagggatcaccaacaataatggctactttctctctcccacacccacagcaggtacacggacactgtcatgaacagctaccagtcgatgagcgtacctgcctcggcatctgcacagttcgctcagttctatcaacatgccacagccgccgcatccgcggtatccgcggccagtgccggcgcgatcggcgtggactcgctgggaaatgcctgcacacagcccgcctccggcgtgatgccaggggcagggggagcgggcggagccggtatcgccgatctgcccaggtatccctggatgacgcttacaggtgagtcaaaactcgatactcgatagtgcggagatatattatacataagtaaaaaaataactgccagattcggactctttgtgaaagacttcggatctgaatgtgagtgccaaatttgataaatcttgaaagttatccgatttttagaattgagaatcacacatatcccaatacaagtttatcacactgagccaatcaatcagtcttttaaattaagagtctgtctatcgtatctactgtgttctatatatcatgccaatcattataaaatcagaaataatccgtgcacttcagggaatgtatatcgtcttaaatcaagaataaattgccttcaagatctacaaagcgatctcttaaaattttttgtgtacatataaatcatggccacttacactgaaatcaaaaaatcaaataaaaaattgtaagaacttatattggattgaattatttagtcgctatgttaggttaaatactataattaaaaaatttaaacagctaagttgtttaacaacccgtagacttaaaccaggttcgaactgatttacaaattgtatgacctaacaaaaagcgtccagtcgaattatcgaattaaatttcccaagtgtagtatttggaatggttgctgcgtaccttttataaacaatagataaacgtggcgcaaacgttccccaatagcattcccatttgcaccgccatttcgcctacaattccaattcgtaatgaacactttgcggagcacttccaagtcgtttatttcgcataagtcttccaggcgattcgaatccgtaaacgaaatgaacgaagagctaaaaagttggcagtaaataaaaatgaaaatagtttgagaaatgcttctcttgtctgtcgtgttatttggcgtcgatttgtaatttaaatagcctcaaggttgccccacaccgacaaacgtatagcccaaaatgccgaccaaaaaacactgcgatgtgccccgcgcatacaaaatccacatatccgtcgagagatacagatacagatactttttggccgccgctctttttatgcggctaacgtagtacgggcgaactcgcttcaaatttatgtgggtcagtttaatttacgcgatccgctcgctttttccgcgcattttgcacagcagatttatttatcatttctcatcaggccactcgatttccacgctgcacaagaagaaattgaacgaattcaattttccattctgccccgcgggttgaatgcctcctgattaatggcagacaccatatgaatagactgtcaattggcctgacttatggactgcacatcggtcgtcgtaatagaaaaagatcgcgcgacggatttacgcggaatttacggcataggcatgttaattaaacagtataagtaattgttaattgacgatctagcagacagagtttaaataatggcattaatacgagataacaaggtagtgtgcttaagggtccaatgtttatcaagtggtatattttgtcaaatcattagaacttaaaatcatcgagaaaagaggttcaaaagtttctcggtctttttttttttgccagcataatttacatatttgaccagatttgggtgtcaataaatcgataaccagcgctcctattaatctatgcagattaaaaatccattcctctattttagtgggtttctggttcgtcgataccccgaaagatattaatatgtggctaacacacctatgtatttggccggccagctaatagatacacacattctgcaggcaaaacctgatggtgaaaagaaaacccgaagcatcggccagttgggaagataaacggtatttcgcacaatgaaatattttgcatatctcccgctcacagcgccaaggcgataaaattgtcaacgagatcatagagacgcgactggcggcgatgaaagtaaatacgagcatgacgccattatggcagccaagtgcgcgacacgtcgacgcagccccctttatccaccactccttaaatgcacatgctgtacataaagctgtatatacatacgtacgaagtatatatgcatgtgttttggcactatatccatgcacttgcatgtggattgcacaagaatcgcttcgcctccttcggaaaagtcttttcgtttggctttcactttgccaagcctgcgaacccacccaaaaaactcacagacgaagaccaagacccagacccggacgcaccggcaacatgaacaactgcaacagcaactgcaacaaccattgctgcaacaacggcaacgttttacagctgaatgcttgccaaatgcaatttaactaatgaattttaatattttacgccaaagcgtctgaatgaattttcattttcacatcgttgcaccgactccgacaacaacatcaacaatgttgccaagggggcagcagcgggaaatcgcaggaaaagctggaaaatgagtagagctgcgcgcctgcacctgattatgctgataagaagcaaagaggttaacttttcttaattatctggaaaagcgcagcccgacaaagcatgaaaatggcaagtttcccatcgctatccacattgagaattcgcaaactcagcacgctccgtggagaaaggaggaggtggacacaaaaaggttaagaagtaggcacactgacagaaaacgtgcagtgggttctaaaaacccgtggatatatttactgactcaaaataattaaattcttgttgaagaaacatttttttcagaaatgtaaacctataaaatacattcctagttattcagcacaatagactttggaattttatattgatattagaagtttgttatgggtccgagtatctattaacgtattttcgtccatgtgcagtcagaacactgacttggctagataagaaacgtctgcaccataaattgtacaatcatcagtgcgacaaagaagtctcggcctgcaaaatctttgcacatattagagattgtctgtgccccgtccgtccgtctttccgtgtgtcaaataaagtggcaacaacgactggcgaatgaccagaaatttgtgtattttaattaaaaatgcaccaacgatgccgagcagcttcatctgcttattaattaggaggagtccgtctggtcgttggctcgcatcatcattctcccctccatcttgcagtgccttgactagtattttcctcatatctccgtcgatatcgccgacatcttctcctcctccaggccgaccatcgtggtctacttaaagtggagccggtccaactggccggaggttcactcggccggtggtccgccgactgccgactgcattgggccggctaatgctgctttttgtggctggcgctgacaactaaattgaaaacggcccgattgagtggtttatgaaagctgccatgtggcacaaatgtccgagggggcagtggacagatatgatttgagggatcgacgctccattactcagcgggatgctctcaaggctgtttggcgcggaatttcgcattagcagcacatatgagaagcacaactccttagttccttagaaaaaaactcaaagaaaaaccgaaaattaattgcttttctcttcctcctttttttaatttcagactggatgggaagccccttcgagcgtgtcgtttgtggcgatttcaacggtaagtaccgcaattaaccggaaacccttgaagttaatatcccgactgacattgaagcaatgggttatttcactaatcggccgtggaatatgccggaaaatgctgttttttagagcctgcctagatggccttgaaaaatatgatttacctgctcaacccagcgactttcacccgctgaaggaaacccttctttgtaaaatgcagcctgcaatctgccgtcacatgactcctgctgtcctgtcataaatccctcaacctttgttctcacatccttgtcttattcattgtataatttcattgtttatcggagtcatcttctggctaatatccaaagcaaccaatggttttgaagccaaaggtttggacgtctggcaactgttcgctttctatgttgatttagcaaactccgtgaaagttgcaccgataactcaaacatgccggtcaagtacccgaccaagatcgtaaatcacaattccaatgctggggccccccaaactgcaagctgctgttgtccataacaattgggcgaatacctaatgagtcgatctcgatgtcagaaaaactcactcaaagacgggctctcgattgatcgatttgtacgatcgccgatctgcgatgggtccgttgttctgggcctcgttaaacgtctttttatgggcgttttatgatctatttacgattttacgcatggtcttgtgccgtgcataacgatcgtaatgttgcggccactgtcgaacgatccccgttttatggtcccgataatggcgttgattgtttggcgaatcaccatcgcgtttaattagttcgacagtcgacaagggcagccgcaaacacgagtagccactgtcaattgctggttacaaaaggcggtcattaatcggtattcacattcacattcccaatcccaatcccatctatgtatatgcccatttcacttgagttaatggcgctacccattagtcgcggctcgaattaggggcatgtagtcgaataacaatatggaaccaaagtgtgtttattatttcactgcttggcttatttccgtgattaaagtgggcccagaatttctaatagtaattaacaattagtgttgaccgtaatgactaattaacccagtcgttgcatttgcataacaaataattgttatgtactttgtaaaatttgtttcttccctttatttatattatcttatttatattatgttcgtatttcacaataattccaagcctggctcacaacttaaaaaatcgtaatgatgttttatcgattggaaaatgaatccaaccattcaactccctacattgcgcatacgcgtagtggtccccctagtgacattaacagcctaccccctgttgttggtgtggcatgtaattgcgaaccgtttaattgggctcgaccactgggcaaacattgcggcacatggcccaacaatctgccttgctggtactatggtgtggaggcctctggtcctctggtctttggtatttcttatgtggtctctggacctggaatgaaatcggagcgttcgtgccagagtttgccaccgcagaagtacgtgccacggctcagcttttggcgtcacagatcgtttgatattcgagcggtttcaagtcccctgaacttcccctttgccactggcgatcctctggtgtttgttttgtaaataaatcactggcattggcgttgagcggagtcattcgggcaatttacagcactaacagccgctgtttgacaagtaattaactcaccgagttccagttgccattctgcatagattgctgtggtcgagttttggttgggtataagattacaatcagaagatcggacgacaaaagcgtttctttaagctgaattttacaagttcttacatcagcttagttttgtttcacttttcctatgaaattgaaacagcaaccctagtgtgagtgtaatataatgtaattccccaggtgcgctcccacgacaattaataatttgtaaagcaaataacataaaaatgtcgtaagagaccgattatgttaaattttaatattatttagtcatcatatttcattcacagagctcaagaattgctaattcaatttattcaaacttacatacaagtccttcaatacaaacgcaaacatgtgtaagttttgcatacagtaaaaaacatttctttcggcagttttaattaactattacagttttgaattgttgttactgcaatttgtaagcttgctcctacaatttatggtcagttttaaaagctcttgatttttttctgaaacaaatcactcatttcttttcaaagtccacaaagctattatctatcttcatggcacgatttatttgcattccttgcacagcgaaatcggcgcgaatggaataataaaatatattatttttattaattttacaagccataattgcggctcgcgataatctcgtcagtcggggaattgaattattgccacaaagacctctctatctctgggccagtctcttttctcgcccgcccggcaagagtctctttctgaattgaatgctttgtcttgggatttgaactggtcttgctagaaatcaatgcaatatcaatgtttaaattcaattgttggcggcaatcaatgtcattggcaggggattctgggggcgcgaagatccgcctctggcagataatcgttgatcccgcactggggttaagatccctcagcaccccccacccacttagcatccctctctgtctgcatacgtggtgctatctcgctcgaaacatggacgacggctggcaagggttaatttatgaggcgcgataagcgaattccatttcgtttcggttttgtttaatttccgattctctgtgttttctgttttcctcatttttatttggtcttgttgtatttacatttggtacttctttctctttcttttcaaccaagctatctctctctctgatggggagtgtgcgacaccgtgttatcggcacgttttcggtcgttgtattatttttttgtttttttttttttattatttctgcctgcggtggcggaaaattcgaaatgacacgtttctccgagttttgtgttgtttctgccgttttttaactaccccgtgaggctgttaatctgcggttttaatgcccaagtggcgcgaattggcgaaaggggtttggattacaaggatccggtgcggagcaccacgacaggatgacagaaccacagacaacgacaaaatggcagccagactggcgcgatttttcgtcagtggtagtgggccggcagacatgtaaatttggcccagacaaaatcaaattaaaagcacacacgttccacagacaattgccgactcgatcccagtccatcgctggcgcttaatcaaagtttattcccttcatgcatgacacacagacagaaaagttgataaagcttgctattatagttttcaaaaaagtaattaataaggtttattgaaatattttcatattgttaaagatacatcttctatcttctgttcttaaattagccgttatttattttggtagcactctttttcacagtgcacatttgtgagtccaaacaagcacatcattaggcaaactttacccatttccattaagttaaatatttaatttacacaaaagttttatttaaaacttgactatggcgtgcgacatttttcgagttttccattttctgtatcgcgtgcaatgcgtgactgtgggcattttccgaccatcctgttgcgataaatttgaagacagagagtagttaatattaatttaatcgcggaattaaacaagttgctggcggtgtcggttaatgcacccttgttctattctagcggctaaatttattatttcttctgattaattgcgagattagagtgtttatgatgcactcagtactctttgatgtgccataatcgttgggtaatgtaagtggcaacgaggtaaccgcatttcttgaggatgagaatgtatttaggataggaaaggaatttatttatagtagaattttgatgtttctaagtagatccttcttataatttgaattttaattttttgtgagctcttattttaaatattgttcatatgtacttataagtatatctgtgacaattttaaacgttacaattctgaagaacttcctctcaatttcacttagggaatgaaggaaacgatgtgcctattgtgtttttggtatcttcccctcgaataacttgtttttccagttgttgtctgatgtgagaatcctttcttaccctcagtcatctcacctaatgaagcaattcaggtgattggagttcctccgccatagcttcgttgtaatagttgtgaaaagaacaaacttgaaagggtcgaacactgggggaaataaaaacctgtaggtgacaaaaaacctttcatctgggatcaatgcaacagcaacagccaccatttcctcaaattactctctggcagccattaacaaaaggcaaactgtacgtgtgtgtgtgagccattaatcagctttgtcagccaaagagaatttcgagggaagttcaagattggaaacactaataggtgaggttcgttttctgcggtctgcggtgcatcgacattttctcaggagcccacaggaccacaccttggcatttcgcggggggaaactaaacaggggttttctgtgggcattataatgaaatttccagacgagggggataagcatgagttatgtgcacgcctaggtaaatatagaacccgcatcgatcgatcgatgctttttatacgaatttaagtgtcacgttctcgtttgatggaagttgtgcgggggattagagaggggacaccgatatgggtgggggtgcttcactgaatggcgttttaatacgtcatcgtttcaagtcggcccacgcaatctaacttatgaccgacatctgcccccaagttctgcattcgaatgggaataggaatccggagttcgtgtttgtttttaccaaataggaatatgtatatataggtatatacacgagtgcttggatccgtgtgcactgggccatgaacagagttgggaaaatgagacgaaaaaggcaaggaaaacccaaccaaagcaaacaaaacaccgaagaaacaataccaaaatgcgttctcagtcgaaagcagttggctcaatttatatgtattttcaataaaagtcgatataatgcttgccaaggttcatagaacgaccaaatgaacttggaaacggccacagaaacaaaaaaggagaaaaagaaaaaaccggcggtggcagccaatgaaggcaatcaatttcaattcagtttcctcgcctttcccaaaacgccaaacccaatgagccgtccaaagggctagacgaggccaattgcagatgggttacggcttcagaacctttttggtaccccttatcctgtttaaatggctgtattgaatttctagacaggcttcacaggtatttggccaagcaaggttgtgaaaagataaaaattttaatgctcaactgaatatttaatcatatcattacaatatatatattcataatcgaaattgcattacaaataagctttatataaagtaaaatcctttaaaataaattttgagtaatggttaaatgattgcaactatttcagaagagtacccagtatggtacgtcccaaacgaaacttttgctatacagtaccctttgtcttcatttatcgtccgaaatgaacccctaacaaaggattcaaaaagtgttgatgaacccgaccaccgaccgaatgtcagctatgtcagatacagatactttttcagatacagatacggacaactaattccactcacatacagatggagtctctttggcgccacttcattgtgatcattgaatggccgttgattgtgtcgcatcgattcgcggcgattttaatcgcaggcggcggacattaaacgcctttaatttgcaattaaattgcggcgaacagacagagatagaaaagcggccagaaacagataggacaagggtgctcgagttgcggtcagttggcgacacgtgttccctggaacagcgcttgaaacagacgccgttcgcaaaaatcttacggattaccaattctagacgcctaatgccatttataggccatcgctacaaatgctccacagctgtccgtccttccaaaattagttgggctccagctcgccacccggaactcctcttcttctctccctttctctccgggtgggccaacaaatttattggaaccacttcgccgcgatggtttaagaaggggggcccagaaaaagtctgattttccggtttccttttggcacggctttctgccaaccccacacatacattctgcggctggtttcttccgttttcccttttcacttttggccatatatttttcacatttatgtcgggtattttgtcttatcacaccctcgtgtttgcagtgcgtgcaaaaaatgccaggggacggtggggagttgtgcgatgggcggtatggttgtgccgtccaccacccacaagattaaaaatgccataaagacagtaagggtgaatggctctaatggctgccgttgccgttatttgccatcccactcgcttgcgctctctctacctctctcactccctctttttccgtctcgttttcactctgtgcaaaaagaaaactcgggctgttaccatgttggcttgagttaccatggcttctggtttgagtcagagctgagggctgtctgcactttttgggatacagggcgcatttcgaatatttggaactggcaaatgattatctggcgagataatgggaaaaacatatgagaacattccatacattcgataatgcatcggtaaggtatttttcgaaggagattggctagcattagacatatgcctgcaaaaatttgataagactcaaaaaacaaacgaaattcctaagatttcccaatgaaaatcattgtttttgagttgataaagctttaatacgtatatggtttttaaaacttatcgttaattatataaaatccaaattggaggaactacttatcttttccattttaattgcgaattgtaatacacaatttctttcaaccccaatacttctctcttgcgttaaaacagaaacgaggagtaatttcaataatggcgtgaaatatttgatgagaatatattaatcccccaggagcctgtgtatttgcaacatttgccaggaattttctccacttttgcccgcggaacagaacgaaacacaactgacagcgacagcttgccatatattttccaagattaagcacacaattagcaggggaaatgggacgtcggagttaggggcgtggcagatctgatagcacaaacagcaacattggcaacgcgctgcacataaattgcagagaaggaagactcccccgtaaagcaggctttccgctgccaggttttccgcaaacaagacaccacccacttttcctctctggcgaacgaaatggctgtgagactgattaaatttaaataaatttaataaacataaattatttgcaatggcaaccaggagctgctgttttagccaccccaaaaagtcgagaatgagcgcaatttaatggcggcgcttacctgccactcccccaagtatcctgtgtaccctgtgtctcgtgaacatcctgcccatcctcccccttttcgctaaaagccacacaaaagcgccagatgttgcccgtgagtcttgtcggaatagcgtttaagcggctttactttcaaagtttaattagtcttcgtcgtcgctcaaagaattccacgcatttgcatatccttggaagttggggccgggaatgggcgatagaaacagctccctggggatctcatttatcccgaggtacattgcaatttgcgctaaatgcctgaaagatcgtctccgtaaaacgatgtacttccttaaccagcggagaagagaatttgttgagccatcactaaattctcgcgaccccaaaaatattcctcatttcagagcatgttgctatatctgcgtctgccctttgtttatatatctctcaacatgccatccgggaagttagtttcgaaaattcataccaaatataaacaaatcagcataaaacatatgccagccagtgaaatttcttctctcttgaataagaaaacgagataaatatacgacggcataaatatgcgtacacattggtggaagccttattccttatatgaatgtatttttcctcaaaaattgtaacattttaacccaaaaatgcgtgatttcgataaagatgtctacaaaagacatcaatatcttcatacttaagcagtacaatttttgcttacgtacaaaattctgtaaaaatgtctacaaaatgtgcttttactgacaaatttcgttaaaatatatttgtacaattaaatgccttacatgagtataaattcgctatatagtagagtacgaaattatacttaaattttagtgctaaatcagtaatatattaattttacccacccagtcccataaagtttacgaaaactcacgaattccgctcgaagacaaatacacaacggaatttgcgcgccaaaagtcaacaaacaagtcaaaggcgggaaaagttctccaattccacaaaacttgaatggtcaacagcagcaaaatcatgaaatttatttgccggcaaacaatttgaaccagataggaataggaattcaaattcaaactaattgccggcaactgaaacaacaacaatgcgctgaagcaaaagcacgcaacaatgtttcaaagttctttgtcaagcgatatgtaaatttgtttattatttaccgaaaacgaaagcaagaacgctagaaagggatgggtgcatagaaaaaataggagccaaacactaaacacgaaatacttgtgcggcaaaatgtttgtttattgtacatttttttgtcgcttgataaacaagactcgaagacttgtcagcgtccccacggaaccactttcgaatgcacacatagatactcacaccacacacacacagtgccagatacttgggcaaactatggcgctcgccccctttgagtgtgtgtgtgagtatctttattgtacgctttgaattgtttttatgatttttatgtcatcataagtttcagtctgcgctgttttttttttcagcttctcgtttttgtatgtttttgtgcttatttatacgcgccgctgtttattgaacaattacgtttatgattattaatatttttaattgttaatgtcattgttatagacgctgtcccgggtctgtgccataaccattcccattctcattcccataaccattcccaggcccattcgcaccgttgacagcggcgccttgggacggctttcctggcctttttgtcacctctcggatttcctcagccaatccgtagagtatacagtggaattgcccattgtgggcagccccattttggacgccaacgccaccgcgtctggaatttccttcgattccgaaacagatttctgccctcagctcgattttccgcctggctgttttgtttacccgcccgtcgcttcactcaattgcagccacgatttatggcgcgctaattgatttttaattggaaaatggttttccttagtaattgtgcaacggaccggttcgaccggccacctcaactcgaaaatataaacttaagatagccgctaagcgcttgtcaaatctaccgaagctctcaagttaatttaacgatgagtgtgtaattgaaattcaaccaataacccacttcttatccatgaatttaagtcaattgcttacatcagaaaacttcaaaggtatttttgctttataaatactctgtgagattaatctaacttaatgactcaccagggggcaaattgacgcatgttattaatgaatgcaattaaaatatatttatttcatttgtttttactaattaaacgcttcaattaaatatttttgttttaagcagtatataaacaatagaaactcattcaccctaatcaacacttaacgctttttgaaatacctttcatttctgtaatatttgtactacctctacctatcttcttctgctcctttggctctcactgagctcctccatactctgcttataataaagatttcataatttttagaaagatcaatgaaccctcgaaagtcccccacaacgccgctcgcttaaacactcaaatccgaaacccgaattgaaaccgtcttagactctagacttttcccaagcggatttaaggctttccgaatagttttcgatatgagtggaactgcagttggcattggaaaatcaataacaaagttgggccgtgactcaaagtgagcgctctccttttcgctcagatccacattcacatccacgtgtgagtgctctcttcgcaattccggtttggctgcgccgactcaccactcacactaagaaaaaactcaggcgttgccatgccgacgttttgctctttccctctctctatgacaatgtgtgtgtgtgtgtctacctgtgcgaaggcagacactgcggcagccatgttggattccatcactccgtcctgcgagccagcagccatctcgctcgcacctgcgcttagccattggcggccattgcgggggtcgtaaatcttgtttaggggcgcgtgtgtcctgggagtcgtgatttatgggacgaattgtagctgctcattgtagcgtgtaaataatttagattagtttggtattcctggccacaggatagcagggggaaaacgggaaaggggggttgattagaattgaaattgctattgcccccttccctttacactgtttcctgttcactccagtaacaatgtttttcgcattttattgctgctctccttaaattaaaagcaaagtatagtgtttgtttaacaagaaattaatttaaaagattaatttgaatttaattatcggataatgaaattaaataaaacgattcttttccattttaagacatttgggaccattcggcgtccatacatataaatttttttcttaacatcactgttccgttcatccgaaaaacaggagctggggttttttgtattttccaccagtgaatcaccaatacttcttatcggttgaggtaaattcaaatgtcacggccttattcgcccgtaaatattttgccaactgttcagtctcataaaaaatgcagcggaaactagaaaaaatcacaatgatttacaactgcagccgagcaacatatacaattctgcacctttcataatattacgtaaaaattgtcccttttttattttgtctgcttgaacagttaccgttggaaagtcgcaacttgcaaaccataaaaaattgccgttgacatgaaaaccttttgccagaaaactcggcacaaaggcagcagtgcaaaaaagaagagacatgaaagccataaaacggcaagcgggtataagtgagaggctgttaggctgggactgggacagcaatttgtagatagcgaatttttgatttccgtaacataaacacggagcctgtgccattccgagcgcatctccgcacaccgtcgcgcaaaaaattcgcacaggtagcatggaaaattgctaaaaataagaaacaaaaaactagacaagaaagtagagaaaggaatgcggggaaaatcggggaaaagcgctggctgctggccaccagggcgagacctgccgctgggcgagtcggtgtcggtattggtagcttcaccctttcacgcactgcgtgcgatgccaatccgcagttgaatcaggtccgcaatggaccccggggtgttgacgtcctggggcgccggctgctgacgtcagctctagcatcagatcactcccttctctctctctctctgttaaaacaatctgtttgtttttcccgtaatttgcagtcagacattcgcagtgcagctcagaaatgtacgcccccaacctccaaacccccataccccagcacaaatcatgtgtcgacgcctgacatgtgttgcagctggccaaagtaccattttcgaccgtctgacaccgtcttagcagctcattaggcgttgccgaaaaaggcaaaaacatcttcttaaacatcgttgcaaacatctgacgcaactttctccgttttctcctccgcaggccccaacggctgtccacgaaggcgcggtcgccagacctacactcgcttccagaccctcgaactggagaaggagtttcacttcaaccactacttaactcggcgaaggcgcatcgagatcgcacatgccctctgcctgaccgagcgacagatcaagatctggtttcagaaccgtcgcatgaagctgaagaaggagttacgagccgtcaaggaaataaatgaacaggtgagctggtccttccgcagcaccttaaactcttaactaacttgctttccgtttttaatttacctttaaggcgcgacgcgatcgagaggagcaggagaaaatgaaggcccaggagacgatgaaatccgcccagcagaacaagcaagtgcaacagcagcagcaacagcaacagcagcagcaacagcagcagcagcaacagcaccaacagcagcaacaacagccgcaggaccaccactcgatcatcgcacacaatccaggccacttgcaccactcggtggtaggtcaaaacgatctcaagctcggccttggcatgggcgtgggcgtcggagtgggcggcatcgggccgggcatcggtggcggcttgggcggcaatctgggcatgatgagcgccctggacaagagcaatcacgacctgctaaaggcggtcagcaaagtcaactcctaagctgacaaccacccatcgcccagccgagccaacgagccaatcttccaccagccgcaccactagcaccaccaccgcagccatcgcccggatcagcgtccggcgttatttttcgtctcctcgtctgtgtagcgcgcgagatagcaagcagaagataaactcgataactaaaatacgtaaagttttacatagtaaatagttgcataagtctacaaaaaacatacatacacgcaaatggctgggtgcgatggcttagaggcaattaactggaccgggttttattgctgtggatcgacgctttctgaggtttccccaattgtagttgtctatttgatagagcaacgcatgcgattcccttccagatctccagtggcaatttgtgtattcgacatttcttccatactttcgcttttgcaacccctaaatcggcaattcaacccccagtgtagagtctctgggccaacgggcccaattcggtaatattaatggataacttgaactacttagaatagcggcaaaggcctaaggaagaagttagcaggagacgcgatctatataaatgaatattgacgaaatgagcgatttttgatagtcagagaactccgttgcccaccatcaaccaactttcaatggaagtggttttggggaaggcaactcgacggattcgagtgtaaaattatttgcgactgctataggataacctagttcgatatttagagccacgttcgactatgttaaacggtatatgaatacataaatatatggatatgcttacagattaaagatacttacctatagagttatagagcgtacgttttgtatccacctatttattggaaatttatgtttatgttttcaaaagaaaaacccctcttccaatgttttgttaagtgatgtgtttactgtgtgtttgctgttttcgttgtatgccaacgcttgaatacaatgatttcttcaatgccatattaatcttaactcgagagcaagtaaacaattaagcagctaaagtaaagtacgcaaaacaattgcgcaagtatttccataaataccagt

SEQ ID NO: 42452 - DNA, 1738 bp, DROSOPHILA
accatatgcaaatttaacaaatttcgttgtgaattcgccagcttcgagcgaaaaaagtaacagaaacagaaaagctgcaaatacaagctgctcgccaaaagttcgctagagaaaacttgagaaagttgccgccgccctagccgccgccgccgcctctgcatccgccagcgtttcagccagcagcagcagcaacaacaacagcagcaacacgatcgctggaagcaacacaagcaacaccaacaatagcagcagcagtccaagcagcagcagcaacaacaacacagcaccacccacaggtgcagcagcaacacctgaaccaccagcagcagcaacatctgcaccaccagcagcagcaacaccaccaccaatactcctcgctctcggccgctcttcagctacagcagcaacaacaccacattagcaaactagccgccgccgcagttgcctcgcacggacacgcccaccagcaactgttgctaacgcccccgtcagcgggcaattctcaagcgggcgacagcagctgctccccatcgccctcggcatccggtagctcctcgctacaccgcagcctcaacgacaactctcccgggtccgcatccgcgtccgcctccgcatccgcggccagttccgtcgctgctgctgcagccgccgccgccgctgcggctagctcctcgtttgccatccccaccagcaagatgtatccgtacgtgtctaaccaccctagcagccatggagggctctccggaatggccggcttcaccggactggaggataagtcgtgcagcaggtacacggacactgtcatgaacagctaccagtcgatgagcgtacctgcctcggcatctgcacagttcgctcagttctatcaacatgccacagccgccgcatccgcggtatccgcggccagtgccggcgcgatcggcgtggactcgctgggaaatgcctgcacacagcccgcctccggcgtgatgccaggggcagggggagcgggcggagccggtatcgccgatctgcccaggtatccctggatgacgcttacagactggatgggaagccccttcgagcgtgtcgtttgtggcgatttcaacggtcccaacggctgtccacgaaggcgcggtcgccagacctacactcgcttccagaccctcgaactggagaaggagtttcacttcaaccactacttaactcggcgaaggcgcatcgagatcgcacatgccctctgcctgaccgagcgacagatcaagatctggtttcagaaccgtcgcatgaagctgaagaaggagttacgagccgtcaaggaaataaatgaacaggcgcgacgcgatcgagaggagcaggagaaaatgaaggcccaggagacgatgaaatccgcccagcagaacaagcaagtgcaacagcagcagcaacagcaacagcagcagcaacagcagcagcagcaacagcaccaacagcagcaacaacagccgcaggaccaccactcgatcatcgcacacaatccaggccacttgcaccactcggtggtaggtcaaaacgatctcaagctcggccttggcatgggcgtgggcgtcggagtgggcggcatcgggccgggcatcggtggcggcttgggcggcaatctgggcatgatgagcgccctggacaagagcaatcacgacctgctaaaggcggtcagcaaagtcaactcctaagctgacaaccacccatcgcccagccgagccaacgagccaatcttccacca

SEQ ID NO: 42453 - protein, 330 aa, DROSOPHILA
MYPYVSNHPSSHGGLSGMAGFTGLEDKSCSRYTDTVMNSYQSMSVPASASAQFAQFYQHATAAASAVSAASAGAIGVDSLGNACTQPASGVMPGAGGAGGAGIADLPRYPWMTLTDWMGSPFERVVCGDFNGPNGCPRRRGRQTYTRFQTLELEKEFHFNHYLTRRRRIEIAHALCLTERQIKIWFQNRRMKLKKELRAVKEINEQARRDREEQEKMKAQETMKSAQQNKQVQQQQQQQQQQQQQQQQQHQQQQQQPQDHHSIIAHNPGHLHHSVVGQNDLKLGLGMGVGVGVGGIGPGIGGGLGGNLGMMSALDKSNHDLLKAVSKVNS

SEQ ID NO: 42454 - DNA, 3754 bp, DROSOPHILA
aacacgagtattggctgctgtccaccgaacatctttctggctgtttaatttatttctgcgtgaaaacaattgaactcgtgctggcgctgccgctgtttgaaagagaatgagtgaggttagaaccgccgatgacacattattcgagaaggttcgataggatattgagcggaccggcttgttagttacttctgccagttccttcttctagtttcttttctttcctcacttactgctaactgacttttgcgatcgcttataagtttaattcaaattctccacaattcgaagcagcagctctcttaagaatcgatatcgagaaacagtatacttacactatgcagcttttgttatcgatgtcacagaattacattcgtcataactgcgattttttgaaggcgcctaacttggttttaaattttccaccctgaggtttaagcgaaatcaaaacattaaacttgtaacaataaataatattttctacggtgtaagtgatactggaaattaatttatattacgaatggattttaaatttatgttatatagcatatttctatcacatcataattaaaatgtggaaattttgaagcctaaaaagcctaaccaactaaactcaaaagaagttaaaatataatttatgaaaattgtatcaccttcgaaaaagaaaatgttggaggatattctgaatataacgggggaaaagtgattacttggaatgatgagttacataaacagcgtcgaactttttaatatttgaagatcctgtgctgtattcaataaaactgctcaaaacgtattaaatggatttcatggtagtttttatatataaatggaaaaacaaataagttttgcaaatactttaaaagtgtagtgtaagcgtttcataaattaaataaattatcgatatcgataacaaaccgcgagtcagctgtggcctgtttgtttacgatacatttcggcttcaatttgtttttaatagttattaattttttaactagacaacatggaggccaagaagatatcttttggctttagtaaattgtccaagaaaccaaacattctgcccagcaagcagccgaaagaggaaagcaaggtggagttgataaaatgcttggaaggaaacgaaatcatgccagtcgagtaagttaaaatatcttgaaatagttttatactcatatgtaatatttagcgaaaaggtggaagctgctcctcttaccatcaaaatgataggcatgcagaagacttcgtccgctttggcgagtctgatgaggaggcgggcagttctgctgggcgaggaggaaccggatccagaggaggtgactccagtggctcagtctatagcagaggtcaccgcaggcggtccaacggagagtctggaacagagagcagctcgggaattgatatctgccatccaaaataacggtgccgaaggcctagatgaccagaaacttgtcctgcccgccctaagcgcagacgaactgcctctcgatggtgccaaggaggcaacactagatgactatgacaacataccgatacaacaatttggcctagccatgctgcgcggcatgggctgggttgatccaccgccaaaaaagaagggctcaggacccatcgatgatgccccctttctgcgacccaaaggcatgggcctgggagcagataaggcgctcaaacctaaagctctactggtccagccggagaagaacgaggtactggagattaagaagcaggcgtacgtgcgcattctgggcggaaagcagaaggatcagtatggccaaatccaaggttttgatgaccatgcagggcgagtaattgtcaaaatggcaattggaggggccaaagaggcgttcaacgagttcctttgtcagcccgtatcccgcaaggagtactctcagtatggcaagtgcataagtaagtggagcctggaaaatgcaaatcctttatatttgtgacatttttatatttcttttacatttactttcagacactgccaaatacgaagaattcaaaaaaaatgaaaacgagcatggccagattattgtgaagcaggaaaatccgtcaggaagaagggacagagaccgcagggaagaaattagatcagaccgggatgaagctcaaaatcaaaagagttcgaagccaggggaccagagatctagtaaagaagactatcgcatgaaatgcaaggaagaagataaaaggtcttacaaatatgaagacaaaaaaacgtacaaagacgaacatcgcaggacgtacaaagacgagcgaaaatcgtacaaggaagccaaatctaacaaagaggaggtggatcgagaaaagaagtatgtgcggagtggtagctcctctgtatctaaacgcgaggaacgtgagcgtcgtcgttcgccgagtcccagaggcagaagcccatctaagtcgaagcgggaagaccgtgaccaaaagcgttcgcaaagtccccgaagcaccagaagaacaaagagtagttcagacgaggcagacgatacgggagagtccaccgagagcgactccgactctgcatatgaacgcaggaagcacaagaagaaatcatccagccacaagtcaagaaaacactcaaagaagtccaagaacaagtcgagaaaggcggacaacgactccagcttagagagcgatgacagcctcggtgaaaaccatcgtcgtcaccacagcaagcacaaaaagaagaccaagaggagcaagcatgtcaggtcccgcacgcgatcaaggtcaagagaccgtcagtgattgatctatttagttgaaatctttatttaaatatagttcattagacgcttaagttcctttttttatcttacttgggattatcataaatttcaattaactcacaaaataatcacaaaaatgccttgtcttttgttgcgcgtttttttctctctccgtacgcctcgtttcgagaatacttctgtcttacatgttacaaacttatagtaggagatgtgatggggccagaaccacggatttgctagttttccgagttttttttttctgtatgcgctgctcttatcttttaagatatttatagtttcaaattcaatgcgcctaatgtgtgatttagtgatgcgatgtgtgcataatggcaagtagatgacttaggcatgttttatatttttggtcaaatggtgatgagtttatctggttgctttcctttactgcagcttccttttgccgcactggatcttctcgttaataatcttcgaggccctttgggtgatggccttaaaaatgtccttgttctgtagtcctggccacatgaggatgagtagggtggccaagtacataagcagtagattgttaatgatggctccaatccaggccatagccaaaagacccaaactcatgacgattacaaactggaatcaaaacgaataaatgtgagatgaaataataatagaacccgaagtttttatttacacttgagcttgcagaagaagatctactgcacatactaggccctgaaactgcttctctgttttcatatacatatacacacacggtctctaccgcatctactcaccactgtggacttccgctcgttgaagaggtactcgtaccagaccaccaggctgcccttgacggcgcacacctggccgcacacgtcctcgaacttggcctcctggtcgccatcccagttgactccgccaaagatcaggcgcgacaccatggggaatgcgtagttcagcaaaatgctaatgacaccgagcagcgacagcagggtaatcagcga

SEQ ID NO: 42455 - DNA, 1632 bp, DROSOPHILA
atggaggccaagaagatatcttttggctttagtaaattgtccaagaaaccaaacattctgcccagcaagcagccgaaagaggaaagcaaggtggagttgataaaatgcttggaaggaaacgaaatcatgccagtcgacgaaaaggtggaagctgctcctcttaccatcaaaatgataggcatgcagaagacttcgtccgctttggcgagtctgatgaggaggcgggcagttctgctgggcgaggaggaaccggatccagaggaggtgactccagtggctcagtctatagcagaggtcaccgcaggcggtccaacggagagtctggaacagagagcagctcgggaattgatatctgccatccaaaataacggtgccgaaggcctagatgaccagaaacttgtcctgcccgccctaagcgcagacgaactgcctctcgatggtgccaaggaggcaacactagatgactatgacaacataccgatacaacaatttggcctagccatgctgcgcggcatgggctgggttgatccaccgccaaaaaagaagggctcaggacccatcgatgatgccccctttctgcgacccaaaggcatgggcctgggagcagataaggcgctcaaacctaaagctctactggtccagccggagaagaacgaggtactggagattaagaagcaggcgtacgtgcgcattctgggcggaaagcagaaggatcagtatggccaaatccaaggttttgatgaccatgcagggcgagtaattgtcaaaatggcaattggaggggccaaagaggcgttcaacgagttcctttgtcagcccgtatcccgcaaggagtactctcagtatggcaagtgcataaacactgccaaatacgaagaattcaaaaaaaatgaaaacgagcatggccagattattgtgaagcaggaaaatccgtcaggaagaagggacagagaccgcagggaagaaattagatcagaccgggatgaagctcaaaatcaaaagagttcgaagccaggggaccagagatctagtaaagaagactatcgcatgaaatgcaaggaagaagataaaaggtcttacaaatatgaagacaaaaaaacgtacaaagacgaacatcgcaggacgtacaaagacgagcgaaaatcgtacaaggaagccaaatctaacaaagaggaggtggatcgagaaaagaagtatgtgcggagtggtagctcctctgtatctaaacgcgaggaacgtgagcgtcgtcgttcgccgagtcccagaggcagaagcccatctaagtcgaagcgggaagaccgtgaccaaaagcgttcgcaaagtccccgaagcaccagaagaacaaagagtagttcagacgaggcagacgatacgggagagtccaccgagagcgactccgactctgcatatgaacgcaggaagcacaagaagaaatcatccagccacaagtcaagaaaacactcaaagaagtccaagaacaagtcgagaaaggcggacaacgactccagcttagagagcgatgacagcctcggtgaaaaccatcgtcgtcaccacagcaagcacaaaaagaagaccaagaggagcaagcatgtcaggtcccgcacgcgatcaaggtcaagagaccgtcagtga

SEQ ID NO: 42456 - protein, 543 aa, DROSOPHILA
MEAKKISFGFSKLSKKPNILPSKQPKEESKVELIKCLEGNEIMPVDEKVEAAPLTIKMIGMQKTSSALASLMRRRAVLLGEEEPDPEEVTPVAQSIAEVTAGGPTESLEQRAARELISAIQNNGAEGLDDQKLVLPALSADELPLDGAKEATLDDYDNIPIQQFGLAMLRGMGWVDPPPKKKGSGPIDDAPFLRPKGMGLGADKALKPKALLVQPEKNEVLEIKKQAYVRILGGKQKDQYGQIQGFDDHAGRVIVKMAIGGAKEAFNEFLCQPVSRKEYSQYGKCINTAKYEEFKKNENEHGQIIVKQENPSGRRDRDRREEIRSDRDEAQNQKSSKPGDQRSSKEDYRMKCKEEDKRSYKYEDKKTYKDEHRRTYKDERKSYKEAKSNKEEVDREKKYVRSGSSSVSKREERERRRSPSPRGRSPSKSKREDRDQKRSQSPRSTRRTKSSSDEADDTGESTESDSDSAYERRKHKKKSSSHKSRKHSKKSKNKSRKADNDSSLESDDSLGENHRRHHSKHKKKTKRSKHVRSRTRSRSRDRQ

SEQ ID NO: 42457 - DNA, 3418 bp, DROSOPHILA
tcagtatggccaaatccaaggttttgatgaccatgcagggcgagtaattgtcaaaatggcaattggaggggccaaagaggcgttcaacgagttcctttgtcagcccgtatcccgcaaggagtactctcagtatggcaagtgcataagtaagtggagcctggaaaatgcaaatcctttatatttgtgacatttttatatttcttttacatttactttcagacactgccaaatacgaagaattcaaaaaaaatgaaaacgagcatggccagattattgtgaagcaggaaaatccgtcaggaagaagggacagagaccgcagggaagaaattagatcagaccgggatgaagctcaaaatcaaaagagttcgaagccaggggaccagagatctagtaaagaagactatcgcatgaaatgcaaggaagaagataaaaggtcttacaaatatgaagacaaaaaaacgtacaaagacgaacatcgcaggacgtacaaagacgagcgaaaatcgtacaaggaagccaaatctaacaaagaggaggtggatcgagaaaagaagtatgtgcggagtggtagctcctctgtatctaaacgcgaggaacgtgagcgtcgtcgttcgccgagtcccagaggcagaagcccatctaagtcgaagcgggaagaccgtgaccaaaagcgttcgcaaagtccccgaagcaccagaagaacaaagagtagttcagacgaggcagacgatacgggagagtccaccgagagcgactccgactctgcatatgaacgcaggaagcacaagaagaaatcatccagccacaagtcaagaaaacactcaaagaagtccaagaacaagtcgagaaaggcggacaacgactccagcttagagagcgatgacagcctcggtgaaaaccatcgtcgtcaccacagcaagcacaaaaagaagaccaagaggagcaagcatgtcaggtcccgcacgcgatcaaggtcaagagaccgtcagtgattgatctatttagttgaaatctttatttaaatatagttcattagacgcttaagttcctttttttatcttacttgggattatcataaatttcaattaactcacaaaataatcacaaaaatgccttgtcttttgttgcgcgtttttttctctctccgtacgcctcgtttcgagaatacttctgtcttacatgttacaaacttatagtaggagatgtgatggggccagaaccacggatttgctagttttccgagttttttttttctgtatgcgctgctcttatcttttaagatatttatagtttcaaattcaatgcgcctaatgtgtgatttagtgatgcgatgtgtgcataatggcaagtagatgacttaggcatgttttatatttttggtcaaatggtgatgagtttatctggttgctttcctttactgcagcttccttttgccgcactggatcttctcgttaataatcttcgaggccctttgggtgatggccttaaaaatgtccttgttctgtagtcctggccacatgaggatgagtagggtggccaagtacataagcagtagattgttaatgatggctccaatccaggccatagccaaaagacccaaactcatgacgattacaaactggaatcaaaacgaataaatgtgagatgaaataataatagaacccgaagtttttatttacacttgagcttgcagaagaagatctactgcacatactaggccctgaaactgcttctctgttttcatatacatatacacacacggtctctaccgcatctactcaccactgtggacttccgctcgttgaagaggtactcgtaccagaccaccaggctgcccttgacggcgcacacctggccgcacacgtcctcgaacttggcctcctggtcgccatcccagttgactccgccaaagatcaggcgcgacaccatggggaatgcgtagttcagcaaaatgctaatgacaccgagcagcgacagcagggtaatcagcgacaagtccaggtaccacagcaccaggtacaggcagctgatgacgccaaacaccactccggcgtagtactgcttctcccaggttagcacgccgtacgctcccacgatggctgtccggaaaggctccaagtcgtgctttaatttgttaagtgctcgtttctggaaaatgccggaaaatgaggaatcattatgatattaactaatggggcttcaatggcgacgccgttttccggccggaaagctttcggcagttccacccttcgctcacctggtcaacctgcgatgctgccatgctggcttttctttgtttcctagcggtgcgcgttcaattccgagaaatctatttgatgcccaaaggtgttgctttcggtttgagcgaaaaatcaattttcttgggtgttttttaagtcgccaaagtcgcagtgtgaccgttgatcgacgttttgaaatgactgattcaggggttgtttcactcaaacagcgattgcactttcaatcggaacttatcgaatttttccctttacaactctgttttaaaagtttgtattaaaaatcttgtattgatttggctaaaatctgatgctaaattctaatgccacctgacatttgggcttacatttttgtttaaaatcttgacagcatcctatcataaaatattgatttactatatcatgatttttataagcagaactaaaagcccataaatggcttaataaaataaatacataaatcaaaaattaaattgccgtactattcaattcgaaactacaaaaatggaaagcaaagcatcattttggcttttgctagttaatcaagcaaatcaacagcggcttacttagataatgaactcaaagccaccacatcttgtattatatgcagataaaatgttgtaaatatagatcttaaattcttatatcaatggcacggaatagctttagtttattgctaaaaatttacttcaaaagaaatttgtacttaactatcatgaactttaacgaagctacaaaaaaatatatatatatacatatatacgtttggacaaaatgaagagtttccatctgtttccatctcgaggaaattcaaattgatggttataccacgggtaattgaactgaaatctttgattgcttcggtacaatacaattgtgtaattgttgggtgaatgggaggagggttcatacaatagttcattctgttgatcaaataaattcttttgtttaaacaagtgattgcattttgacctaatatatggacagcgtcgtgggactgaagataccggcggaaatgtgtcctttcggacagccttgcaacttattgccggatttcccaatagagctgatggcattttccgacttttccgctttaacacatttattaccaacataaattcccagtgaaaccttaggttagagccgtttttattaaaagt

SEQ ID NO: 42458 - DNA, 1145 bp, DROSOPHILA
gtcacactgcgactttggcgacttaaaaaacacccaagaaaattgatttttcgctcaaaccgaaagcaacacctttgggcatcaaatagatttctcggaattgaacgcgcaccgctaggaaacaaagaaaagccagcatggcagcatcgcaggttgaccagaaacgagcacttaacaaattaaagcacgacttggagcctttccggacagccatcgtgggagcgtacggcgtgctaacctgggagaagcagtactacgccggagtggtgtttggcgtcatcagctgcctgtacctggtgctgtggtacctggacttgtcgctgattaccctgctgtcgctgctcggtgtcattagcattttgctgaactacgcattccccatggtgtcgcgcctgatctttggcggagtcaactgggatggcgaccaggaggccaagttcgaggacgtgtgcggccaggtgtgcgccgtcaagggcagcctggtggtctggtacgagtacctcttcaacgagcggaagtccacagtgtttgtaatcgtcatgagtttgggtcttttggctatggcctggattggagccatcattaacaatctactgcttatgtacttggccaccctactcatcctcatgtggccaggactacagaacaaggacatttttaaggccatcacccaaagggcctcgaagattattaacgagaagatccagtgcggcaaaaggaagctgcagtaaaggaaagcaaccagataaactcatcaccatttgaccaaaaatataaaacatgcctaagtcatctacttgccattatgcacacatcgcatcactaaatcacacattaggcgcattgaatttgaaactataaatatcttaaaagataagagcagcgcatacagaaaaaaaaaactcggaaaactagcaaatccgtggttctggccccatcacatctcctactataagtttgtaacatgtaagacagaagtattctcgaaacgaggcgtacggagagagaaaaaaacgcgcaacaaaagacaaggcatttttgtgattattttgtgagttaattgaaatttatgataatcccaagtaagataaaaaaaggaacttaagcgtctaatgaactatatttaaataaagatttcaactaaa

SEQ ID NO: 42459 - protein, 197 aa, DROSOPHILA
MAASQVDQKRALNKLKHDLEPFRTAIVGAYGVLTWEKQYYAGVVFGVISCLYLVLWYLDLSLITLLSLLGVISILLNYAFPMVSRLIFGGVNWDGDQEAKFEDVCGQVCAVKGSLVVWYEYLFNERKSTVFVIVMSLGLLAMAWIGAIINNLLLMYLATLLILMWPGLQNKDIFKAITQRASKIINEKIQCGKRKLQ

SEQ ID NO: 42460 - DNA, 3960 bp, DROSOPHILA
cttcaaaagaaatttgtacttaactatcatgaactttaacgaagctacaaaaaaatatatatatatacatatatacgtttggacaaaatgaagagtttccatctgtttccatctcgaggaaattcaaattgatggttataccacgggtaattgaactgaaatctttgattgcttcggtacaatacaattgtgtaattgttgggtgaatgggaggagggttcatacaatagttcattctgttgatcaaataaattcttttgtttaaacaagtgattgcattttgacctaatatatggacagcgtcgtgggactgaagataccggcggaaatgtgtcctttcggacagccttgcaacttattgccggatttcccaatagagctgatggcattttccgacttttccgctttaacacatttattaccaacataaattcccagtgaaaccttaggttagagccgtttttattaaaagtagacagagatgggatgagaaatacattgaaataaaagcaagtccgatttcgattatttactcataaatcaaagtataatctacgattataaaaattaggctctttatctatattcgactccaaataatcagtaatttcagtcgcattcaatatttaatttgaatgatagacaaaaattaatcgtgttaggaggtagtctctacatatatctaatggatgatggatggttatgttcaggtgtttttcttcgaaatactgcacatcttgtaagttgccattcgtgtttggattttgtcatttttgtgttaatatttcgtggtggatttgttgttgagaccgtttttaacagtttttggttaattatataaattcaatttatattataatgagatgaatgcatcttcgcttgcatgatcccatttgttatttatgttattgttcacgcatagccgagcgaaatgtccgatattatgcgtaactaatgagatcactattgttttcgtcgctatctatataggtttcagtgtctagaagcgtcggtgtccccatgaatcaatgtgtccgtgttggtttccgtcgctattatctggacctccaggtccagccattgttgaattgttgctgttgttcccaaatacttcaaaaggggaatcaaagtgttcgaatccagagttgctgcctccgaatccctcctgctgatcgaggatcatgttgagtttcttggcctgcattagcaaatcgttctcctgctgacgggctcgcatatcctcctcatggcgaagtaattggttttgataacgatgcatgtattcctcttcccgctttcgaatctcctcggcttgtttctcacgcatctcccactccagtttcatgcgctcgttgtccagctcgcgcttcttcagctcctggcgcagcagttcggtctcctgttcgtagcgagcgtactccatctgggcctccagcttgtcctcctccattttcaactcacgcttgagtgagtcctgtttgctcttgaagagatcgtgcaattgcttccagcgtgatccatactcgtgctcaaacgaatttaaacaagcgaaacgcggtccgacactacgctcatgtctgaattccagcgactttttgtttaacgtcttatccggcaagccgtcattgtcgttgttcacctccatcggttccaccagacacggacgcaatgaagcagtcaagaagaagcatttttcgttgcacaggcgcagacaggcgctggccgaggacttcttggcgaactcaacaatgccttcgccggtatgcttaccgcgatcgtctacgcagataacggcgcgctcgatgggtccaaagatctcaaaggactggtgcagcagctcgttggacacgaactggttgagattagtcacacgcacaatggcgttgggcgcaaagcggacacgcagcactcgtcccttgcgcaaggagccatctaaagcgcgtttggccttctcagcattttggtagtagtctagcctcaggaatgtaaagttcttctccgggttcgagaatatatcgccgatctcgccatatggcttgaacatctcccgtaggtcgtcatcagttgtgtcgctggtgaggttgccaacatataagcggttgcgtccgacgaatttgttatcggtgggtaactcaatgggcggcaactcatgggtgggtccactaatgtcgagcagtcgttgggcaatgaaaaagtcttcgccgcgctgcccaccgccgcccattgatgagttcatgattccagatcccccagagcgcctagagcggtttccacgctggtgttttccacctccagcaccgcgttggccctgtcctcctttattgtctccttggttgccgggatatccattgctttgctcctggttggcattctgattcggctgatttgggccaccaccacgacctctgaaattcggtccttggtttccctgttctccttgatcgccttggttaccctggcccttgttactatggttcggctggttttgaccacctccgccagctgagagttcattgttctttgcgggcacattgcccgcagccggcttcggcgattcgttaatctgcttttgatgtgaattatttgcgacttggaaaccctgccggttttcattttggttgccgcctcgattgcgatttctggaaaattcaacgccgccagtagcaccaccaccaccaccaccaccgccagtgccgccgccaccagctactccaccaccgttctgggtgtttcctccaagtcttgcctttttctcggcaggattaccgtcgctggcagcatttagcttcgggggcgttggcttgcccaggttcttattggtcgaattgcccctctgctggcgttgtggcaatggcgaagagttcaaactgtttttcttaacagcgccctccatggcaaacgaaaaatactttttcccaaattcaattttctatgcgaaaaaaaaacaccgattggaggaactgtcaggtatgaaaaaaaatgttaccaggcacagaaaggagtttattccaactgccttaatcccctaaaatatccgggttgaaaagataaaacttaaaatagttagttacattaatcgataatgttgatggtataacactttttagaataggaaaaacgggaaaatcgatttttcacacaactatcgatgttttaatggttgtaatattgggtaagtaaactatcgagcggaatttttcaaattaaaaaaatttcacgtttttgaagggtattcgcggaataaagtcaatactgtaactaaggatctataaataatatatccaataagcaacattccagttgttattcattttataatttctattattcatactccaaaatgtttcaggaaggtggctttgtaattgtgaaattttttaagtaaaacgaattcaggttccacacccataacccatgattaagtgcaaaaaaggacggtcgatttatttatagttagttttaaagttttattattcgctcaagcttgctgaagattctcggttgacattcggttttctagtacatgtaataattagtttaactaatgctaaatataatctgtctgttctttacgagtaatttaaatggattcggtttatttgtaaaaagcgcttgtcgtaaaataaaatggaataatattcttttgcactccagttttccatagtttgcttggtttcgcatattgtatatatttgaatcatatatttcagtgtctaacgcttgcttagaaactcaatagctaatatacatcaattgtatgtgattcaaattccacttgttaggttcttgcgttttacagtaaataaactacatattacatatacgttatattattctgacaattaaatatatgaaaaatatgcatttctcgatttgtttggtgtatttggtgtaaatagcgtgtggcgcaatatcatttgtagttatacttgtattcttggggtgtaactccgtatatat

SEQ ID NO: 42461 - DNA, 1960 bp, DROSOPHILA
ttcctccaatcggtgtttttttttcgcatagaaaattgaatttgggaaaaagtatttttcgtttgccatggagggcgctgttaagaaaaacagtttgaactcttcgccattgccacaacgccagcagaggggcaattcgaccaataagaacctgggcaagccaacgcccccgaagctaaatgctgccagcgacggtaatcctgccgagaaaaaggcaagacttggaggaaacacccagaacggtggtggagtagctggtggcggcggcactggcggtggtggtggtggtggtggtgctactggcggcgttgaattttccagaaatcgcaatcgaggcggcaaccaaaatgaaaaccggcagggtttccaagtcgcaaataattcacatcaaaagcagattaacgaatcgccgaagccggctgcgggcaatgtgcccgcaaagaacaatgaactctcagctggcggaggtggtcaaaaccagccgaaccatagtaacaagggccagggtaaccaaggcgatcaaggagaacagggaaaccaaggaccgaatttcagaggtcgtggtggtggcccaaatcagccgaatcagaatgccaaccaggagcaaagcaatggatatcccggcaaccaaggagacaataaaggaggacagggccaacgcggtgctggaggtggaaaacaccagcgtggaaaccgctctaggcgctctgggggatctggaatcatgaactcatcaatgggcggcggtgggcagcgcggcgaagactttttcattgcccaacgactgctcgacattagtggacccacccatgagttgccgcccattgagttacccaccgataacaaattcgtcggacgcaaccgcttatatgttggcaacctcaccagcgacacaactgatgacgacctacgggagatgttcaagccatatggcgagatcggcgatatattctcgaacccggagaagaactttacattcctgaggctagactactaccaaaatgctgagaaggccaaacgcgctttagatggctccttgcgcaagggacgagtgctgcgtgtccgctttgcgcccaacgccattgtgcgtgtgactaatctcaaccagttcgtgtccaacgagctgctgcaccagtcctttgagatctttggacccatcgagcgcgccgttatctgcgtagacgatcgcggtaagcataccggcgaaggcattgttgagttcgccaagaagtcctcggccagcgcctgtctgcgcctgtgcaacgaaaaatgcttcttcttgactgcttcattgcgtccgtgtctggtggaaccgatggaggtgaacaacgacaatgacggcttgccggataagacgttaaacaaaaagtcgctggaattcagacatgagcgtagtgtcggaccgcgtttcgcttgtttaaattcgtttgagcacgagtatggatcacgctggaagcaattgcacgatctcttcaagagcaaacaggactcactcaagcgtgagttgaaaatggaggaggacaagctggaggcccagatggagtacgctcgctacgaacaggagaccgaactgctgcgccaggagctgaagaagcgcgagctggacaacgagcgcatgaaactggagtgggagatgcgtgagaaacaagccgaggagattcgaaagcgggaagaggaatacatgcatcgttatcaaaaccaattacttcgccatgaggaggatatgcgagcccgtcagcaggagaacgatttgctaatgcaggccaagaaactcaacatgatcctcgatcagcaggagggattcggaggcagcaactctggattcgaacactttgattccccttttgaagtatttgggaacaacagcaacaattcaacaatggctggacctggaggtccagataatagcgacggaaaccaacacggacacattgattcatggggacaccgacgcttctag

SEQ ID NO: 42462 - protein, 630 aa, DROSOPHILA
MEGAVKKNSLNSSPLPQRQQRGNSTNKNLGKPTPPKLNAASDGNPAEKKARLGGNTQNGGGVAGGGGTGGGGGGGGATGGVEFSRNRNRGGNQNENRQGFQVANNSHQKQINESPKPAAGNVPAKNNELSAGGGGQNQPNHSNKGQGNQGDQGEQGNQGPNFRGRGGGPNQPNQNANQEQSNGYPGNQGDNKGGQGQRGAGGGKHQRGNRSRRSGGSGIMNSSMGGGGQRGEDFFIAQRLLDISGPTHELPPIELPTDNKFVGRNRLYVGNLTSDTTDDDLREMFKPYGEIGDIFSNPEKNFTFLRLDYYQNAEKAKRALDGSLRKGRVLRVRFAPNAIVRVTNLNQFVSNELLHQSFEIFGPIERAVICVDDRGKHTGEGIVEFAKKSSASACLRLCNEKCFFLTASLRPCLVEPMEVNNDNDGLPDKTLNKKSLEFRHERSVGPRFACLNSFEHEYGSRWKQLHDLFKSKQDSLKRELKMEEDKLEAQMEYARYEQETELLRQELKKRELDNERMKLEWEMREKQAEEIRKREEEYMHRYQNQLLRHEEDMRARQQENDLLMQAKKLNMILDQQEGFGGSNSGFEHFDSPFEVFGNNSNNSTMAGPGGPDNSDGNQHGHIDSWGHRRF

SEQ ID NO: 42463 - DNA, 11380 bp, DROSOPHILA
tctttttagtagtacatttaatgatcacctaacaggcaacaaaaatcctaaaaggcactcactaatagattcccttctcgccaacagggatgaccgccttcgtactgtgcattctggccatgtcctcgggactggctgcacttttctccagccgcatcaagaagctaatcacaccattgctgaacaagacgttccacaacttcctgggattcgcgtgctttgtgatcgcactggtgacccagtactatggctaccagacgggctactttaagagccgaagtgagacggatttccaaatcctgatgaagtgcctcaccctcatatcgttggtcctgtcgagctacggaccgatgaaggcactctatcagaaatgcaaaaatatatcgcaacagttttagataggatgaaaagaatcactcgaatgtatgtagataaataaatgtaattttttctaaaaccccattttatcgacctatccaactataccaacaacgattcaaaattttatacctgtttattggtacaacgtgtgatccataaacatgactaagtatttttacaatgcctcattagggaaaacccggttaaccagcggtcagactttcatcgtccggtactcccccctgtaaaagttatataaccacccttttgattgatttgatttgataaggtctgaaaaagtaatgaattgactattagatacactgcaatttgcatttaagtttaaccgctcactcaaaaagccagcatttgaattaatcaatcaaaattatgatcatttataatttaagttatactattattcattttcctataacagcattgggtagcatgcatcattttaaaatccaaaacatgaccgggttttttatctgatcggtttgtgacacttggaggccgcataattgatagtaactgtcccaaataagtccaaacttttgaagccccgtaaaaagaagatcttgacttccggcaccttaaattaaaaaaccgtgtattttgcatggtgcagtttcgtatgtttatttagaaaatccatatcatttcttcttaaatctctcgcaataaataatacttggcgcgtgtgtcgcgttgtgtgtgtgatacgtatatcagttagcagtaataataaatagctagcgttaggtattaaaattcatagtcaattgggtaatacaaggctgtctggctttaaaaccccctttctgggtaacttttggtaagagaaagtcaagatctctatatagaatcgggtgaacagatctttagcatgcggtaggtaaataggagttatcagctatcgactaaagcccagttaagaattgtgtgttgggcaaggcatattcgaaattcgactttctatatcttttcatagtttccatagttcgctccgctcacagcttgttgctgcgtcgaatggcgaaggacattagcgcgtgctccagccgcatgtggtagggtagcttgcgctccagaatgactggctcctggccatctggacagcaccggttgcggcagcactcgcactggccgtcgtcatcgtcgtattcctgctgcagttcctgctccagttcgtaggccttcttggcagcccgctgctcgaagcgcaaatagaaggccaggcagacaaacagcataaataccagggcacacatggctccactggcaatgctcgccttctccaacatcggacgcggcctcttgggcaggtaagtattgtcgatctccttgtattcgcatcgctgtcccataaagccaatcgcgcactcgcagctgtaaaccggtagatcggctatcttcaccgcaaagcaatgggcatcgttcaaacagtaccaggcatcgaaggtttccggacatttgtatgtggggaatgtaatattgggcctgggcgtggtcgtcgtggtggtgcgcattgtggtgctactagtgactggagcctgggtcggcggcaatgccgtgccggacatggacgaggagatcgaagagcgcggcttgggcaccgtacggctggagcaggcctcgacgtgccacggatgtgccagacagccgatcagtaccagggcaaccagcccatgttgtacactcattgtggaatgcattacaatttgtagctttttagcgtagcgtatcggcttgttcgttttttggcgtgcaacgtttggttgtttaaaagcttaagaatattaaaactagtgactatcacataaataaattagaatattcgttgtccgctgctagggcgtcgtcaaatctctttggaatcgggtttctctacataggtatgctgctggtggaacgtaaacgttgagttaggggtgatgtgtgtatctgtggggaagatggaaagacattagtggccagtagtctccaagcaccatcgatggtttttaactctaaaactgtgtactcaacagaagggggaaaatcaaactgcgtaaaatcataattatatatgtatgtatttataaaagtataaactataatagatcgctttgaatagtagttatgttacaatcagcaaattttactcctttcttcacatccaattcactttcggtttaaaatttcatttacgttgtctcccgttgattatcctagctcatcaaagctggctgtgatatgcgttgggtatccatatcacaaccacttgatgaggcttagataatcaacatcgtacaggtaaggaacagtttccttaactttatgaattagtaacatggttagtaacaatattgcaccgcatgtgtgtaagtcagttcgatagggccccctaagtctgaggtgccagtccaccagttgagccatttttcggtgctgtggcatgcatctgtcccccgttgttccgaattcagatctctgttagccgcgtttattttccgattgcatttcactacaaatattatacagatttgaggcggacatagtgtgttttatttatgatgggcgtgtgaattatgtggcgggaggtattattatgatttgatgtacgatacattacgctaagctcatcaaagctggctgtgatatgccgcgcaaagcggaaatgcatttcacaaccactttgagagcccagcatgaatgcgccaatatagttttattgattgaggtttcgggatacttgactgcgggagttcagaattttcaattttggttttcatgctcatgtaatgatataaacaaaatcagacacttgttaccgtttttatactttttgtgttcaattatgctttttttttggaattttcaaattgttttttgattgattttttttttgccttgagcatcgcgtcgctcctcaaagctggctgtgatatgaataggcataaaaaggcaaacatttcacaaccactttgaagaatgacacaattctcctgtttcgattcgatgagagccgaggtgcagattcagattcagattcttctaggggtctttttgcaacgttctcacggccgtcggctttgagccttgtacttttttgcagccacggcacaataaacaaatatgaaaaaagtacgtaaataaataaatgcgacgacgagactacaacacgatgataatgacgatcatgacgacgacgacgataatgatgattatgatgatgagactactggtactggtgatagataatacgcaaatgttgattgcaatgaatggcgacagagcgagcgcaagtgaatgggacaatttcgtacatatctacgctatagactggccattgtttcaacaacaacaacaaaattcaacagacacaaacgcacacaacaccgaagaacaacactgaaagagggcaaaaagcaatgcaccccaaataattataataaaaatgtaaacataattttggcgccagcctttggcaatttgacgccaaatttgtttttagatgatttctgagttcaagttcgggaattcaaactgataagaaatgcaaacgatgaataacaaaacggaagaaccgaattcagttgatcctccagaagatcatttaaataatcgattttatcgaaaaattttaaatgcattactgacgaagttcaatcactttaaaatgtgagcaaaacaaaaactttttatatgaaaagacgaatgctgttcaccatttcgagcgcccactgtggtgcaatgcaaaaacagttatacgttgggtgtggagacttatttatgtattagaatgcttttacggttaacaattgctgcactctctaccctctctttctcgctcacgcgcggcaagcgggcagcttattaaaatttccgttataaaaattaaatccaccgccgctgcttttatgttcataaatacatgtgatacgtcgcatgcatgtacacatgcacaaatgtatgtatatacacatgtatgtgcgtttgtgtgcgagaggaagtcgaagtaaggtaatgagcgtaaagtcaagttgaatagccatataaaatgcgctgaacttgcgagcgtgtaggtcaagatcagcggcggccgtttataatattttgttggttttcgcaaatagcaattgacgaaagttcgatgatcttgtagtacatttcaataatgggggaatgagccaactagcacgatagcaacaacagcaatatatacaagcatcacaataattacaacagcaacaacaacaacgatcaactatattagagtgtggacggcaaaaagtgtgcatacatacatgacaacaaaaacacccgctaataaaaaatactgttgtggctgcttcttcttctgctcttgcgtcttttacaacttcttcggcaagccagttgttgttgctgtaattttcatgttgccttgctctctttcattcttgggcgtcgctgcgagttcgttggctcttctcgtttctgtatgtgtgtgtgtttagaaaactgtaaggaaagcaaagtgtgtgaaaaatatggttaaggtaaaaaatgccaatacaggaacaacaacacagctcgctctcttttctctgcctgcagtttcgaaaaaaaatttaccggtttttatgttttcgcaaaaaagctcaagaaacaagtcctacaagttttaaatcgagagaggagagagcagaaaaggcgtgagagcccaaagaatgcgcatttagcagagacaacaaccttttgaggtgtgttgcgtatacgtgcatattcgcacacacacaccaccaacgcttcagctctcgctctctttttctcgcttcgccatctcactcttactccatgcctttcaggggataaattatgtatgtatatatgtaccatgcgtgtgtgtgtgcgcgggaatgttgtgaggaattctaagaattttgcacaagcgacaaatgaaacggggcgcggaccacacatacatatatgtatattccaaaaccaaacaaaagttttaatagttcaaaaagaaaattgattatgcgtcggtatgcgagaagcgccaacagccgaatgcgaaatatatcacaccaacacaaatacagtgaaagcagaaaagacgcagaagatgggaaaattcgaagacaccgcgtgtaggcgttaaaacctattttttttgcccaacaccaagctaaatgaaacactgctcactaaaacaccaattcactatgctttatcttcacaaattaccaactgtttgcatttaaacttggacaacattagggggcagaacgccgacaacgcacaccgcgcacacgaaaaaacacaaccgcaccgccaaagattcgaaaaccgaatgccgaacaacaacaaaattggttctgaagatggaggtgtttttcagcagagcgagattccctggctcacgctgagcgggagagaacgagagcgacaaagtctctcctctaaaaatgcggcataataacaacaaagtggcgagcggctttcgagctcatgctgtatgttgttgtatacccgttacttggagagttaattgggtatacggtgatgggctcttaggcaaagaatttttccaaaatacactttgcataattactcaaataaattgcctcagaagctactttactcgtttaaatcttaaattaatattattccattaatgtcaagccacacaatacaaaattcaataggaatcactcacctatagctgtcattgcaaacaaatgatattacctattggactaaagggtatatctgagtagttacgcttcgtaaaaagggctctctcttgttttggtttttgttttggtgttgccagaagatttcgcacgatgtaggatcaacatgttattgacacgacgtcgccgacgccgccacttttaagcttggcggagcaaaaggcacacaaacaagaagcgacgcagagcggcggtgcaaaagcacaaaaaaaaagaggaaaaatgcgctcgagagcggagggcgtggcggtgcgcaggggcggggcaggtagccggacaaacaggacgaacaggatgaaacccagacgagttcggccccactgcagatttcatggaactggccgaaggttgaggatgcggatgcgatgcgcaggcgcgcaagtaaacaacattccattcctcgggaaatttcttctggccgctcgagaagcgcgccaaaaataaagctccgaccgatgtcgttgccataaatattgctattttgactttccagattctcgcgattcaacgccccttgaaatgggagcaacttgctggagattcgcgtatcagggctggaagagggtttctccaataactgcacattcactcaaaaatatggtaaaaaggtgtgctgcagcttcgagagctcccaagaggtaactttatgttataaaattacatatatttattttatgtatatattctgggaaaatccatacgcgatctaaaacatttggggcgcggttttcacaggtaaatgagattttggaattcctttactgaaatgccaacgtcgatgtcgtcgattttttcaaaaaatcacaaacatcgatgtttttcgaggaatcatcgatgtttctccacctctaataaggcggattcgacctatgtacatgtactgcatgtatgaaagcggcacaactacccgtttccggtgggcagtcggtccgcaatgtgggccgcagacaccattccacagccaattgacgtcacaagcgacacaacagcaacaacctggcacacgctttctgggttatgtcggaatgcatccaaaagcgggagaaaagtagaaaaaggcaggaaaagaaagaaaccaagagtcacccggatggcaattcgattctggtgagatttggacaatcaatcggcttagttcacagcccagcgggacgggactcagtgctacaggttcaactgtacaataataccaagaagatgacgacgatgacgatgacgatgatgatgggggatgggcgatgggcaaaatgttaatggattgccctaggacctgccctcattccgtttgccatcttcgtcgcttcgcttctgcatttgtgcattcccattcccaatccgattcccccatcaagttgtgcttctttgccacaccgcttttctgccccttttgcggtgttctgttgctttgttgatgttacaattgttgcacttgttgtgtgcggcttaggacgttgaaccacagccggcagaaatgcagaaatgcacgcaactgagtggcaagtgtacagctgcagtcacagcactagcaatgctttgcgaaggattcctccagaccgctttgtaattggttttctttcgcgtaatttggccgatattagttagttcatatctgcaatctaaatgttacgaaccagcagagttcctagagccctagagacattaatgtacttttaattgccccactgtatgaatttttttcagtgcattcttgcaatttgctaacgtttttaccgccattaccgtcattgtcggtatatatttgtatgctcattcggaaagccaattcgaaggcaatgctaataaaatcaataaacaacattactgtcacgcacacatacatacatacatatgcatatagcttggatgtccggttgaaacgatgacgatgaaaggtcacgacgaagaatttttcgccaattgcctggtgggtcgcacagtctgggtcgcgagacgtctgactagacaacatgcaaatagtaacggtaatcattagacgcacacactcgcacctatttgcatgcacactctctctggctgtggttctggtcgtgggcccccatatttcatctatctcgcggccgctctttctttcgctcaccattttctatgctgagttcgacggccttcttacgtaaaatcaacaacaacgctctgcggtatttctcttctaataagcgggtgcttggggcttggggttggggggatgtgcactcgccgacagagttgccatatctagccagacatcaaactcgttttcactgttttggctccacacacacacacacacacgcatgtgagtggctttgcaactgtacaagaacaataagtaggggcagcataaaagcaacaacacacggcgcagacgccaagcaaccgctcccctcccaacgctccactcaatgtttgtctgtctgtccggaacgtctgtttatgtatgctttaggcgtatacatgcatgagtgtgtgtgagcaatttttatttttctgaatgtaaaggaagtggcacgtactgtactactcaactcaccgctgccgcaacaacaagagcagtgacagccggatcaggctgggaattcgaataagagcggagcgcgtcgcattcggatgttccgattccccatcgttcccagccgcaaagcggtcagcgttccaatgccaacggcacagtggttgcgatgcgtaaggtaacgtgctacggaaccgaaactcgcggatgatcgtaagtgggagatatgtacgtgggataagagcgaaagtagacggatatccgatttgcaaaaagatgtagtattaatttaaaatgtttagaataacaaaaataagctaacaaaactataaccatgacaaactatgacgataacaatatatttgctatgcgttacgatttacaaactttgaatactttttaaaagatgcttatttaggatcgatccattgtgcagcgagatgagcggaacgaaaggcgaaagggacgctggtttgcgtctccgctgtacgccagacagacagacagacaagacgccgcaatattataaacaggaaatggaatttacccacacggatgcagcgcggtgaagtgtgtgtctgtgtaaattgctgatgagccgacaaacggacgtggtgctcaattgacagatgagcacgagagagacaggcagagcatagcacaccgccgaatgagcgaaggagaaggccagagcgcgcttcaaagttgattgaaatcaatatacgtacatacgtatgtatacacacatagcgtgccggtgtgagtgtgctaagaccgctcgtggaatgtttgaaaaacgcggtcaagcgacgggaagagcaagaatgttgaactctggaagtgggaagaagtttctgtaaatagaagccaggtggaaggggcttttgcacctgccacgcccagcagcccctggaatcaattaacatgttgcacaactgcagcggctcctatatacatagttcatataatgtacttgtgatacagtgacttacgcacacagaggtgcaattgcagatggcgacgagtgtagcgtgtagtttttctcggaaatgagcaatgaatgaaattcggttgttttcagtactcacacgcacacgaacgcagatgcatacactcgcaatttggagcaagagagaaagtctgcacgacatgcgctctggcgtttgtgtgtatacaatttgcttactttttgcgctacaattggcaaataaaacaatagcgcaattttacgcagcactttagcttactaacccacattgatggctccacaaagcgagcaaaataatttgtctgcctaattgaaataaaataaataaaactaagcagaaaaaatgtcggcaaaaaacaaggcgcagctgtattgtgcgctagtgtgtgtaaaaaggagacggccatagaaaaaaaaaacacatatacacacaggagaatttactgctgcttgcggcgcccacacacacatacacaaaaacactcgcctatttagtacagcaactgcgtaaattcaataaaaatagtcatctggagtaaaaaaacccagtttcctgtcttcatttccctttttccgtgaaggtacacagtcactactgttataatttagcacacacactcgcgcatttatgtatgcatttgggttgctttcatttggatgtttatcacttactttaccacttactttgggatttagctcttcgtttgtcgcacttttttggcctgttttcatgccattttctttttgaaaaactgaaagagtacaattcgttgtgtcgcgtcttaaatgaacaagtgttgccagactttagctggagggagatgacactatcgcgaggcagcataaaaatcagtgctgtaaagcgaaattaaaaaaaatatctgataactttaatattagtttatttgtttactgaattttacattttcttatgtactataaataaaaatcaattcataaatttatttgagaggagtaaaacaagaagaatccacctaaacattacagacttaagttctaaatatcccaaacgttgtttaatttctatttatatttgtaacgattagttagttattagtaataatgaaagaactagtgataaaatccatttgtaatcactgctagaattggcttgaaaatagctagactgacgttaacaatactgttaccagttggcatttcctgatccggcaactccacacgacgccatttcaaaacaaatgcgcggcaacgattttattttaccccgcaacatttagtgagaagtcgcaaaataagtcagattatttgattaaaatgggagcaaaggcaacaaaaatggaaggtgaatatctgccggatacgccgacactaaacaaaatgcgcctggccagcgaaaagcgagaacaaatggaaatgacgacgccgaatcgagagcaaaacaacgctttgctcgatcctcgatcaccaaatggctgccgcacgcctttaaccgtgagtttataggcattaggtattttttgatattactaaccctagtaatgatggctgcgttgtagttcttgcaggcgtcaaaacctcgcgttgaggaggaggagcagcatgtgaccaccagtgaaaatgccttctccatgctgcgaaaacgtttgctcaagggcttctccctgaacgatcctcgctctcctcagctgaatcgcactccactggtcctcgatgaggttcgttcgcttaatatggatgacacattcgccgatctcttcgtggacaccagggtgggtacagcacagagagcagtgc

SEQ ID NO: 42464 - DNA, 1616 bp, DROSOPHILA
acacaacgaattgtactctttcagtttttcaaaaagaaaatggcatgaaaacaggccaaaaaagtgcgacaaacgaagagctaaatcccaaattttctaaacacacacacatacagaaacgagaagagccaacgaactcgcagcgacgcccaagaatgaaagagagcaaggcaacatgaaaattacagcaacaacaactggcttgccgaagaagttgtaaaagacgcaagagcagaagaagaagcagccacaacagtattttttattagcgggtgtttttgttgtcatatacacacatcacccctaactcaacgtttacgttccaccagcagcatacctatgtagagaaacccgattccaaagagatttgacgacgccctagcagcggacaacgaatattctaatttatttatgtgatagtcactagttttaatattcttaagcttttaaacaaccaaacgttgcacgccaaaaaacgaacaagccgatacgctacgctaaaaagctacaaattgtaatgcattccacaatgagtgtacaacatgggctggttgccctggtactgatcggctgtctggcacatccgtggcacgtcgaggcctgctccagccgtacggtgcccaagccgcgctcttcgatctcctcgtccatgtccggcacggcattgccgccgacccaggctccagtcactagtagcaccacaatgcgcaccaccacgacgaccacgcccaggcccaatattacattccccacatacaaatgtccggaaaccttcgatgcctggtactgtttgaacgatgcccattgctttgcggtgaagatagccgatctaccggtttacagctgcgagtgcgcgattggctttatgggacagcgatgcgaatacaaggagatcgacaatacttacctgcccaagaggccgcgtccgatgttggagaaggcgagcattgccagtggagccatgtgtgccctggtatttatgctgtttgtctgcctggccttctatttgcgcttcgagcagcgggctgccaagaaggcctacgaactggagcaggaactgcagcaggaatacgacgatgacgacggccagtgcgagtgctgccgcaaccggtgctgtccagatggccaggagccagtcattctggagcgcaagctaccctaccacatgcggctggagcacgcgctaatgtccttcgccattcgacgcagcaacaagctgtgagcggagcgaactatggaaactatgaaaagatatagaaagtcgaatttcgaatatgccttgcccaacacacaattcttaactgggctttagtcgatagctgataactcctatttacctaccgcatgctaaagatctgttcacccgattctatatagagatcttgactttctcttaccaaaagttacccagaaagggggttttaaagccagacagccttgtattacccaattgactatgaattttaatacctaacgctagctatttattattactgctaactgatatacgtatcacacacacaacgcgacacacgcgccaagtattatttattgcgagagatttaagaagaaatgatatggattttctaaataaacatacgaaactgcaccatgca

SEQ ID NO: 42465 - protein, 230 aa, DROSOPHILA; identical to SEQ ID NO: 28689

SEQ ID NO: 42466 - DNA, 5514 bp, DROSOPHILA
gcgagaaatccggaaacactaaagacgtttcaacgaacgcctacaatttccagctgtcgcagaccaataagaataatcacaatcatgggcagggtgtagaaaatttttaacggggttcttaatgcaaatggtatacacaaatttactaatcacacctgaatgtgccctacatatttaacacttataatgcgctatctggggtcggataaccccagactttataaataagtttataaaacactagaaatttcgatataataggcatttgtggaacttttaaccccccacaaccacttctacgaccatgtttttgaagtcactcaaataatgtggcagtgaacttaaatatactaggcttcagagcataaaaaatactaaactgtaacaatatttgtgcagtatatatcgaatatgaattcaaatatctttaaaatcttaaatcatagtttataaacaaatctgcagttgttgcataaaacatttagtcggttttaagactttatctaaattaatttaatataataacacatagtaaaaccagcgtcaaataaatatttttaacaataatttatacgatttttttatgtgttaatgtaaaaaataatattcttagcagaaggcaatcactgcatgtaaggcaattaggtttataagggagggataatcactttaaaataattaactaggtgagcagttgatggtacatgaatagtacaataacaaccgataaagctaacttaaaaatgccttaataatgaatgtacgcaaagttaatagtcaagtccagatatcactaattaaaaagactgctaaagaaaaatgatttaatgaatgaccaatcacattgattgtctctaaatatagtacttaattggtcggccttcttagaaactgataataaaatttggctcttcaaaacagataagttttgggttttctacggtccgtttttctataaaagtgagacaccaattggagaatatttcattgacccgatataatgaaggccttgcaattcgctcttgtattttcggccattctggccattgccttcgctgcaaatgccagttggggagccaaattgtccagcagtaagttggtcagcactcagaacgtgaccatctacaagaaggccaaccaatatgtgagcagtctcatcagtttcccactggcggtcagtagaaatataccttttatcaagaaatattcttaaccttcttattcaaaattaaacagggccagagcaacactaaaaccattcggtacattagcataactgataggtttaccaacagttcgggaccttactccaccttgtggtccggtggaccaggattcatcaatgcccaggtcaatgtcacaagccagttttctcaaggaatcaatgtaactgctcaattttgggtggatgcctaaacctacaacttttccgtatacaaattttaaaatattctgttttgcaatgtattttaaatgtaattccgaattggtaaataattattttcaaatcccaagtcgataaactaaaagcaacataataaagatgtcctgaaaattgacgataatgtttaacgcagtggaattcaactattatttaactattgcttaaaaaaactttcagaaactgaagtctataacttagtcaatttacttttgtagtttatttagatatatgaaaacttcacgggaaaacagtttaaagcagtttttattattaatattatttttaatattatttttattaaaaaataacaaaatatgtttaataatatttgtataactgttatatacagaatgtgtattatgaatttatgtttatttgtatggctgtcactgttattttaaaaacccaaccgttatcgataagtgtgttgttcctgatagtggtttccagtggtatttatggtacggtcctattatcagctgtttatttccacaagccgaaaaattttacaagtttttaattaatttgtaaggaaagtatggttaacgataaaaagcgtcgctcacgatcgcgggagcgtcacagggaggatcgtccggccgtgggcaatccgcgggatcgagagcgagagagggatcgtgtgagggaacgagataggcagttcgatagggagaaggaaagacgccaacgtcgctcgcgttcccggtacgttttactttgaattatggtgaaataagtctcataaactgataaactcatgtgttccagagaggaccgcaacaggcgaaggtcacccgaacgtcaaaggcctagggataatgtccgagaaaggtcaagagaaagaggtggtggcgccggtggtggaggaggaggtggtgcggaaaagaaggccaaaatggatactggcgatgccccacccaaacctttaattgttgacgacgaggagcaacaggacggcaaggaagcaaaggtgaagaaagagccgctttcgctggaggaactgctggacaaaaagaaacgcgaggaggaagccagaagcaagccagttttcctaaccaaggagcaaagagccctggaggccatcaagcgacgccaggaggaagtggagcgccagcgagctgcccatgatgctgcccgtgagcaaatggctgccgccagcaaggtcagtatctctatgggcacggccatggcatcaggagctccgccgcctgcaattgtggcaccgccacccaaaccggatcgtcgggaacgaggaggtggtcgggatcgaggcgacagaattgacagaggagaacgtggcgatgacaagcgagctgaagacctcacccacaaagacaaggaaaaggaattagaagccattcgagaacgctacctgggcataatcaagaagaagcgccgggttcgccgactcaacgaccgcaaatttgtttttgattgggatgctggagaagatacctccattgactacaacaatctctacaaggaacgccatcatgtgcaattctttggcagaggaaatgtggctggcatcgatatcaaagaacaaaagcgtacccagagcaaattctatggagatctgctggaaaaaaggcgaaccgaggcggagaaggaacaggagaaagtgcgactaaagaagatgaagcgcaaggaggacaagcagaagtgggacgatcgacattggtccgagaaggaaaatgatgaaatgactgaacgcgattggcgtatcttcagggaggactacaatgttacaattaagggtgggagaattcccaatcccatccgaagttggaatgagtccggatttcccaaggagatcatcgacattatcgacaaagtgggctacaaggaaccaacgcccattcagaggcaagctatacccattggtttgcagaacagggatattattggcgtcgctgagaccggttccggtaaaacattggcattcctcatacccctgctctcttggattcagtccttgcccaagatcgagcgtctggaggatgtggaccaaggaccctatgccattataatggctcccacgcgtgaattggcccagcaaatcgaggaggaaacaaccaagtttggacaacctttgggcatacgaactgtggtcgttgtgggtggtttgtcaagagaggagcagggcttccgcctgcgattgggctgcgagattgtcattgctacgccaggtcgtctcattgatgtgctggaaaatcggtatttggtgctgaaccaatgtacatacattgtcctcgatgaagccgatcgtatgatagacatgggcttcgagccagatgttcaaaagatcttggagtacatgcccgtcaccaacctgaagcccgataccgaggaggctgaggacgaaacaaagctgatggagaacttctacactaagaagaagtaccgccaaaccgtgatgtttacggcaacgatgcctccggctgtggaaagattagctcgcacatatctccggcgaccggcaacggtttacatcggatctgttggcaagccgacagagagaacagagcaaatagtgtacatgatgggcgagaacgacaagcgcaagaagcttatggagattctttcgaggaaaatcgatccaccagttattatctttgttaatcaaaagaagggcgccgatgttttggctaagggtctggagaaactcggctacaactcgtgcacattgcacggtggcaagggtcaggagcagagagagtatgctttggctgctttgaagtcaggcgcaaaggacatcctggtggccaccgacgtcgctggtcgtggtatcgacatcaaggacgtgtccttggttattaactatgacatggccaagaccatcgaggattacacacatcgtatcggtcgtacgggtcgtgccggcaaaaccggttgtgccatttcgtttgtcaccaaggacgatagcgctttgttctacgatctaaagcaatgtgtgtctgcaagtcctgtctcgacctgtccgccggagctaatgaatcacccggaagcgcagcacaagcctggcacggtggttaccaaaaagcgcagggaggaaaaaatattcgcctaaatttggcaaattctaagcagaactactttaggttaaaatttaaaactaataaagttgggtgcgccaaagccataccttggcaaccaaaaattctctttcgaaatagtcttttgaaactttagattcataaaccatttatttgaaaaaagtctcatctttgtaatctcaaaaagaaggcatttctgctctgtttcgagtccagaggcagatacttgtcataaaagtccaagatgatttcctccatcttaaatccgaatttctggtacaacatgacggccgcgttggtggcggaaacgtgcaacgttatgtccttggacatacatgtctggataaggtgatataacatgaagctggcgatgccactgcgttgccagcacggccgcaccgccatgaatgagatgtaggcctcgttgtaacctacgtcgggcactaggaatccgcaaccgatgaccagtttcttgtacaacgccactacactgtagtccgggtagctcaaacactcgcttactaaaagggaaaaaatcatacaaatttgtacattaaaaaagctaaaaagaaaatcatgaaacccaccatcaatgtttggccaaaaagtactttggagtaatgcgtttacggccggaatatgctgcggtctcacaaaacagaagtcgatggtagatcttgtgggatgagatccgtttactctatgctgcagctcgcacataagcttcagccatggaggagccatcgtttcgctccgaaagataaatggatgaagaactctttgagagtagggcgattcaaagagctcgtattgagtgcatcccgccaggcgggcgtgaaaggagctccttgcatcttgtcgtgaatgggctaacaactgatatctgtcaagaatttcggccttctgatgacccagcatctttaggcgtgctcttcccaggggatctatgtgctcgtccaagttaaatatgtgtcgattgtggtcccttttccattttcgaagagaaagttttcg

SEQ ID NO: 42467 - DNA, 2929 bp, DROSOPHILA
atgaaggccttgcaattcgctcttgtattttcggccattctggccattgccttcgctgcaaatgccagttggggagccaaattgtccagcagtaagttggtcagcactcagaacgtgaccatctacaagaaggccaaccaatatgtgagcagtctcatcagtttcccactggcgggccagagcaacactaaaaccattcggtacattagcataactgataggtttaccaacagttcgggaccttactccaccttgtggtccggtggaccaggattcatcaatgcccaggtcaatgtcacaagccagttttctcaaggaatcaatgtaactgctcaattttgggtggatgcctaaacctacaacttttccgtatacaaattttaaaatattctgttttgcaatgtattttaaatgtaattccgaattggtaaataattattttcaaatcccaagtcgataaactaaaagcaacataataaagatgtcctgaaaattgacgataatgtttaacgcagaaagtatggttaacgataaaaagcgtcgctcacgatcgcgggagcgtcacagggaggatcgtccggccgtgggcaatccgcgggatcgagagcgagagagggatcgtgtgagggaacgagataggcagttcgatagggagaaggaaagacgccaacgtcgctcgcgttcccgagaggaccgcaacaggcgaaggtcacccgaacgtcaaaggcctagggataatgtccgagaaaggtcaagagaaagaggtggtggcgccggtggtggaggaggaggtggtgcggaaaagaaggccaaaatggatactggcgatgccccacccaaacctttaattgttgacgacgaggagcaacaggacggcaaggaagcaaaggtgaagaaagagccgctttcgctggaggaactgctggacaaaaagaaacgcgaggaggaagccagaagcaagccagttttcctaaccaaggagcaaagagccctggaggccatcaagcgacgccaggaggaagtggagcgccagcgagctgcccatgatgctgcccgtgagcaaatggctgccgccagcaaggtcagtatctctatgggcacggccatggcatcaggagctccgccgcctgcaattgtggcaccgccacccaaaccggatcgtcgggaacgaggaggtggtcgggatcgaggcgacagaattgacagaggagaacgtggcgatgacaagcgagctgaagacctcacccacaaagacaaggaaaaggaattagaagccattcgagaacgctacctgggcataatcaagaagaagcgccgggttcgccgactcaacgaccgcaaatttgtttttgattgggatgctggagaagatacctccattgactacaacaatctctacaaggaacgccatcatgtgcaattctttggcagaggaaatgtggctggcatcgatatcaaagaacaaaagcgtacccagagcaaattctatggagatctgctggaaaaaaggcgaaccgaggcggagaaggaacaggagaaagtgcgactaaagaagatgaagcgcaaggaggacaagcagaagtgggacgatcgacattggtccgagaaggaaaatgatgaaatgactgaacgcgattggcgtatcttcagggaggactacaatgttacaattaagggtgggagaattcccaatcccatccgaagttggaatgagtccggatttcccaaggagatcatcgacattatcgacaaagtgggctacaaggaaccaacgcccattcagaggcaagctatacccattggtttgcagaacagggatattattggcgtcgctgagaccggttccggtaaaacattggcattcctcatacccctgctctcttggattcagtccttgcccaagatcgagcgtctggaggatgtggaccaaggaccctatgccattataatggctcccacgcgtgaattggcccagcaaatcgaggaggaaacaaccaagtttggacaacctttgggcatacgaactgtggtcgttgtgggtggtttgtcaagagaggagcagggcttccgcctgcgattgggctgcgagattgtcattgctacgccaggtcgtctcattgatgtgctggaaaatcggtatttggtgctgaaccaatgtacatacattgtcctcgatgaagccgatcgtatgatagacatgggcttcgagccagatgttcaaaagatcttggagtacatgcccgtcaccaacctgaagcccgataccgaggaggctgaggacgaaacaaagctgatggagaacttctacactaagaagaagtaccgccaaaccgtgatgtttacggcaacgatgcctccggctgtggaaagattagctcgcacatatctccggcgaccggcaacggtttacatcggatctgttggcaagccgacagagagaacagagcaaatagtgtacatgatgggcgagaacgacaagcgcaagaagcttatggagattctttcgaggaaaatcgatccaccagttattatctttgttaatcaaaagaagggcgccgatgttttggctaagggtctggagaaactcggctacaactcgtgcacattgcacggtggcaagggtcaggagcagagagagtatgctttggctgctttgaagtcaggcgcaaaggacatcctggtggccaccgacgtcgctggtcgtggtatcgacatcaaggacgtgtccttggttattaactatgacatggccaagaccatcgaggattacacacatcgtatcggtcgtacgggtcgtgccggcaaaaccggttgtgccatttctcctgtctcgacctgtccgccggagctaatgaatcacccggaagcgcagcacaagcctggcacggtggttaccaaaaagcgcagggaggaaaaaatattcgcctaa

SEQ ID NO: 42468 - protein, 802 aa, DROSOPHILA
MVNDKKRRSRSRERHREDRPAVGNPRDRERERDRVRERDRQFDREKERRQRRSRSREDRNRRRSPERQRPRDNVRERSRERGGGAGGGGGGGAEKKAKMDTGDAPPKPLIVDDEEQQDGKEAKVKKEPLSLEELLDKKKREEEARSKPVFLTKEQRALEAIKRRQEEVERQRAAHDAAREQMAAASKVSISMGTAMASGAPPPAIVAPPPKPDRRERGGGRDRGDRIDRGERGDDKRAEDLTHKDKEKELEAIRERYLGIIKKKRRVRRLNDRKFVFDWDAGEDTSIDYNNLYKERHHVQFFGRGNVAGIDIKEQKRTQSKFYGDLLEKRRTEAEKEQEKVRLKKMKRKEDKQKWDDRHWSEKENDEMTERDWRIFREDYNVTIKGGRIPNPIRSWNESGFPKEIIDIIDKVGYKEPTPIQRQAIPIGLQNRDIIGVAETGSGKTLAFLIPLLSWIQSLPKIERLEDVDQGPYAIIMAPTRELAQQIEEETTKFGQPLGIRTVVVVGGLSREEQGFRLRLGCEIVIATPGRLIDVLENRYLVLNQCTYIVLDEADRMIDMGFEPDVQKILEYMPVTNLKPDTEEAEDETKLMENFYTKKKYRQTVMFTATMPPAVERLARTYLRRPATVYIGSVGKPTERTEQIVYMMGENDKRKKLMEILSRKIDPPVIIFVNQKKGADVLAKGLEKLGYNSCTLHGGKGQEQREYALAALKSGAKDILVATDVAGRGIDIKDVSLVINYDMAKTIEDYTHRIGRTGRAGKTGCAISPVSTCPPELMNHPEAQHKPGTVVTKKRREEKIFA

SEQ ID NO: 42469 - DNA, 2984 bp, DROSOPHILA
tatgaataatggagccgtgggtcaattgaaaccgcgaccaaggcgtcgaaagaagaagcgtgtacactaccatcacacgctggtttcttagtccaggaaacacggaatccgatgcacaagctaatcgccatcatcgaaaccatcgcaacaaaacccaagacagaggaaaacacgcacttccaatggctgttacttacaattgaaaaccaaaccaaatactgaacccaattcgtttacgcttaagttaggctttagttccgtttctcgttcactgatttcaatgctaaaaactaagacaaaagtacaacctttaagcaaggacaggctaaaataataacttatgtattcgtgtttatttgaattacgcctaagcatagcatgttggccaactatttgtaatatttcgtataacgtgtacatctatataatgtagaccatatgtttagttatccattaacaagcaaagtggagcggggaaggcccaaggatcgaggatgtgtgtatgtgggtgtgaggaagcgtagcaggaacaccaacttttattgctgtaataacgattaataccaaacattttaaacgggagaactaataaagttaaataaatagtcgtacgcagaaataaacagtgtggttttcttttattttaccgggtattttaataataaatcctggaattcaataaattacaaattcaatagcaatattcaagtaatactacgcatacgcagtgttgacctatccttaatcaatatggataaaaaattaattaagggatttatcgctatgaaattcttaatataaataaaattttatcttaattatttatataagtttttaaatttaattattttattttatcgtgagccaccctaatcttttcatgacagtgttggacaaccgtgcaatagagcacgcactaaatatgcccgcgggcagttgaacgttaatttcacttgttgttacgttggttttaattttcaccgggagctaagcgaacaaaatggagcggaaactgcacagtggaatgcaccatgccacgctgcggcagctgcaggagtcgggctgcgagatagcgccgcacaatctcatgtatccggtgttcatcgtgagcaacgacgacgatgtccagccaattgccagcatgccaggaatctcgagattcggactgaatcgcctgaaggagcacctggaaccgctggtggccaagggactgtcgtcggtgctgctctttggcgttgtggacccggacatgaaggatgagcaggcctccaatgcggattcagcaaagaatccagtcgttctcgcactgccgaagctccgggaatggtttccggatctgctgatagcctgtgatgtgtgcatctgcccgtactcctcgcacggtcactgcggcctgctgggcgaaacgggtctggagaacggacccagcataaagcggatagccgagatcgccgtggcttatgccaaagctggagcacacattgtggctccatcggacatgatggacaaccgggtgaaggccattaagcaggccctcatcgatgcccagatgaacagtgtatccctgctggcgtactccgccaagttcacatccaatttctatggacccttccgggaggcagcacaatctgcaccgaaattcggtgaccggaggtgctatcaactgcccagtggctccagaagcttagcaatgagagccattcaacgtgatgtcgccgagggagccgacatgctgatggtgaaaccgggaatgccctatctggatatcctacgatccacaaaggattcctatccgtatcacacgctgtacgtctaccaggtttccggggagttcgctatgctgtatcatgccgccaaggcgggagcctttgacctcaaggatgccgtgctggaggccatgaagggctttcgacgagctggtgccgattgcatcatcacctactacacaccctttctgctggacattatcggaaaggtcaagtaatggtctacgttccatgtccgatgtcttgataccatgttcatatgtacatgcgtagattagagtggacctcttaaaatcattaatggaaaatggaactttttgtaacagatagtgcaatttttgtaggattttctaattatttatacggagctctccatattttatactttaataagcaaaagaataaatattcagggaccagcatattcattttaccgattaagtggcttaaataagactcaaaggcttttacttacatcaatatagaagttattctaatacattaagatgtgtattcaataaaagaagtccactctagtctcgaatcaacattactaatgcttttggagtgcctcgctcacatgcacacccaaactagaatgtatatttcgatggtcttatctattgtcccgatttggaagtctaatggcccagggtacatttcgaatttcaattgcatggcgaaattcaagcgaacgaaacgaaccgaaccggtcgatccagtagcaagaaatcgaatagatgtttcattttgtgatggcaattaacactttaatgtggaattctctcgattgcatttacaaatgggctacggtgagcattgaacactggctggagcttacttgctaaattggtaccagtttcgagtcttacgaaaagattaaaatcacaaaatcaaatgcattaagtacataaacaattggatccggctctggtttctggtgaaagttgattgagcaataaggtttgggtactattagttcttaaaaaacattatctgataaataaaagtatatggttacatttctaaaactttcacttttatgccgtatactaaatattaatatatttatacacaaatgtataaacttcagcgatttcgattaaaaatttcctaagctccagtgcggccaatttcagtttaaattggatataaaaaacatttgcaagtgtctgcacgaaatcaaaactaattaaaattagaatttaaactaaaaac

SEQ ID NO: 42470 - DNA, 984 bp, DROSOPHILA
atggagcggaaactgcacagtggaatgcaccatgccacgctgcggcagctgcaggagtcgggctgcgagatagcgccgcacaatctcatgtatccggtgttcatcgtgagcaacgacgacgatgtccagccaattgccagcatgccaggaatctcgagattcggactgaatcgcctgaaggagcacctggaaccgctggtggccaagggactgtcgtcggtgctgctctttggcgttgtggacccggacatgaaggatgagcaggcctccaatgcggattcagcaaagaatccagtcgttctcgcactgccgaagctccgggaatggtttccggatctgctgatagcctgtgatgtgtgcatctgcccgtactcctcgcacggtcactgcggcctgctgggcgaaacgggtctggagaacggacccagcataaagcggatagccgagatcgccgtggcttatgccaaagctggagcacacattgtggctccatcggacatgatggacaaccgggtgaaggccattaagcaggccctcatcgatgcccagatgaacagtgtatccctgctggcgtactccgccaagttcacatccaatttctatggacccttccgggaggcagcacaatctgcaccgaaattcggtgaccggaggtgctatcaactgcccagtggctccagaagcttagcaatgagagccattcaacgtgatgtcgccgagggagccgacatgctgatggtgaaaccgggaatgccctatctggatatcctacgatccacaaaggattcctatccgtatcacacgctgtacgtctaccaggtttccggggagttcgctatgctgtatcatgccgccaaggcgggagcctttgacctcaaggatgccgtgctggaggccatgaagggctttcgacgagctggtgccgattgcatcatcacctactacacaccctttctgctggacattatcggaaaggtcaagtaa

SEQ ID NO: 42471 - protein, 327 aa, DROSOPHILA
MERKLHSGMHHATLRQLQESGCEIAPHNLMYPVFIVSNDDDVQPIASMPGISRFGLNRLKEHLEPLVAKGLSSVLLFGVVDPDMKDEQASNADSAKNPVVLALPKLREWFPDLLIACDVCICPYSSHGHCGLLGETGLENGPSIKRIAEIAVAYAKAGAHIVAPSDMMDNRVKAIKQALIDAQMNSVSLLAYSAKFTSNFYGPFREAAQSAPKFGDRRCYQLPSGSRSLAMRAIQRDVAEGADMLMVKPGMPYLDILRSTKDSYPYHTLYVYQVSGEFAMLYHAAKAGAFDLKDAVLEAMKGFRRAGADCIITYYTPFLLDIIGKVK

SEQ ID NO: 42472 - DNA, 2941 bp, DROSOPHILA
gaaaatgctcttaaaagtatggcgttttgctggcgttgccacttttcgccaaagcgcagagttgattgggggcatagagatggcaatttgctgcgatgcacgagctgagcacgacagtcacgaagtgaaaatattttcacgaaactgtactttgttgcacataatagctaatagctaagttaacacgagccgacgaactagtacagttggcttagtgtatgaaacataatatcaaagtgctgagacagcattgggccggagtctttgttagctttaagaatcattttaagtttcagcttaaatttgcagttaccagaataaagagcggcagctcgtcaactccgactaaatgtcgttaaacacatttttatttcttactctgccagaccacaaggatagcagttaaaagaggacagtttctctcaacgtaaataataatcttccgttgctccccggataattattttcaatttttatgtggtatgagtaattggaatgagaaaatagatgaaaaagaaactagctagctaataatgtattgattttattttattttttttggtaattttattacattaccaactccttttaaatatttcactaaatttaaataactacaatctttggatgaattatccttccttgtataatggtataaatataatagaataacaaaaactcgtgacgccaatgtgtcgcttagtgataaaaaaaacgtgtcacgctgccatctcttatgtctgctgccaccaatgcaaaagccgggttggctgtacaaattacctttagtgccacccactaatgaaaatatgtctaagcaaatcaaaatagcctttgggaaagaccaaatagttatgtaatcggaaaattaaaagaacaaagagctgttcagttggcagccccctgtgacttatgcaagcgtcgcctgtgaatggtagatagagaagaagaacaaaaattggcgccaaaattttgttagattgtttatttggtatttaagtttcggccactagttctatggcatccctgttcggagatgatggtgtggatgacctattcaatgacaacattccgactgacccggatcagctgcccagcgatggcgaaggcgaaaagctgtttgcggacgacgaggacaacggcgtagaacctggtagccaggatgcccagatagtggagcctaagaagcgagctgtgagaaatccccgaccgcgactcactgtggaaacacttcgaggtcctcgtggcatccagaccatcgaagattattttaaggacatcaaattcaagggcaagggttacgagaaaaccgatctcgacgaggtgcttcgccgcctgcagcactggggccatcgtatgtatcccacctacacctttgacgatgtgcttaacaatatcgaacggctgggcaagaagaaacccctccaagtgcacatggcgcgatatcgactcggtcagctggagcagatgcgcgcccacgaagcggaggccctggaggaggcgcaggatgagcaacaggaaggtgccggcgatgaaccctttgatgagttcgacgccctgctaggtgaacagattgccatgtccaggctggcgcctcccagcccgcagcagtggaaaatgtctactgcttccagtaacagcacgctggctactccgtcattctcccgcggcaatgctgtaatgtccacgccgtactccggtgtaaatgcgaccttcgacagaagtggagcttctgtggctccggccttcgatcggaatggagctccgttggcatcgatggacatcagcgactatggtcagccgctgcctccctcacagcctcccacgccggcggctaagaaattatccaacgaacagatggccaggattgcggaaaaccgcaggctggcgcaggagcgacttaaggccaagcagcagcaggagagcggaagtaaaagttagtgtatatttatgatataaaaacgcatatttttataattttcaaaggataatttataaaaataaatgaataagctacgttgaaagttaatgcgcggtacttaatatctaaattgatttttctgtacttcgatctttgatgaatatcactttaaatatacccttaatcgtattaaaaccactcgcattagtgttacacatgtatctttattcaaacgttttagtcggagaccgagaataataagttaggattcgggtgtaaaaaactatatggagtgctggagtatttacaaagatgaatggtcatgatggtgagggttcgtgtagaaaatactttacaagtctttaaagactagtcgggatactattagggtactggtgtttagtgggacttggcccatcctaagtgctaaatctgagggcgactctgggcagcgattcgaacagacccttggctccctccaacagagcagctacgatcttgacaagcactacatcttgattcgaagtgctttgtgactggccatcctgatctttgggatctgatcgttccttaatggcctcgcggatcacgtgcaataatctctgatacagaaacgattgcctgtaaatgggcttggagagactcaagtgatcatccttcagcagatagaagtccccgaaatctatcttagaggactcttcggtgacaatgcgcagggggaacttgaacgaggtcaacatggtaggggatccttcagctacactgaccacctttacatggcgcagtagcgtgtgcaagcaccccataaagcggcggtgcatctccagcagcttcggcgagttctcttccatctctttgacctcgattgatggagacaggatcatctgcatgtgctgcttccacttggcaattggtgagccccggtgtggggttcccaaaaatacaatgcctttagtgttcttggtcagctgttggaccttcggctcttgggagtccagggattttagcagtattagcttg

SEQ ID NO: 42473 - DNA, 941 bp, DROSOPHILA
tttcggccactagttctatggcatccctgttcggagatgatggtgtggatgacctattcaatgacaacattccgactgacccggatcagctgcccagcgatggcgaaggcgaaaagctgtttgcggacgacgaggacaacggcgtagaacctggtagccaggatgcccagatagtggagcctaagaagcgagctgtgagaaatccccgaccgcgactcactgtggaaacacttcgaggtcctcgtggcatccagaccatcgaagattattttaaggacatcaaattcaagggcaagggttacgagaaaaccgatctcgacgaggtgcttcgccgcctgcagcactggggccatcgtatgtatcccacctacacctttgacgatgtgcttaacaatatcgaacggctgggcaagaagaaacccctccaagtgcacatggcgcgatatcgactcggtcagctggagcagatgcgcgcccacgaagcggaggccctggaggaggcgcaggatgagcaacaggaaggtgccggcgatgaaccctttgatgagttcgacgccctgctaggtgaacagattgccatgtccaggctggcgcctcccagcccgcagcagtggaaaatgtctactgcttccagtaacagcacgctggctactccgtcattctcccgcggcaatgctgtaatgtccacgccgtactccggtgtaaatgcgaccttcgacagaagtggagcttctgtggctccggccttcgatcggaatggagctccgttggcatcgatggacatcagcgactatggtcagccgctgcctccctcacagcctcccacgccggcggctaagaaattatccaacgaacagatggccaggattgcggaaaaccgcaggctggcgcaggagcgacttaaggccaagcagcagcaggagagcggaagtaaaagttag

SEQ ID NO: 42474 - protein, 307 aa, DROSOPHILA
MASLFGDDGVDDLFNDNIPTDPDQLPSDGEGEKLFADDEDNGVEPGSQDAQIVEPKKRAVRNPRPRLTVETLRGPRGIQTIEDYFKDIKFKGKGYEKTDLDEVLRRLQHWGHRMYPTYTFDDVLNNIERLGKKKPLQVHMARYRLGQLEQMRAHEAEALEEAQDEQQEGAGDEPFDEFDALLGEQIAMSRLAPPSPQQWKMSTASSNSTLATPSFSRGNAVMSTPYSGVNATFDRSGASVAPAFDRNGAPLASMDISDYGQPLPPSQPPTPAAKKLSNEQMARIAENRRLAQERLKAKQQQESGSKS

SEQ ID NO: 42475 - DNA, 4428 bp, DROSOPHILA
cgcacacaaggaaaattttttatacgaaattatagtctttttagtaggtaaattttataagatttgtacattgattagttaaaaacactagtccatactttgctcgcgaattattacatttttaaatcaaaaatggaagagcatgtaataaaagggagctactttttattttctgtgtactgcgacctgtagcagctgcttgggaaatgggtttgttgtggttttctcggttgacatggcgtgaattacttacgcagtaataaggccaactcctccaaggcccaataacttcggatgacggcgcagcttgatcttgagatcctccaatgacattgcctgctttctgatggttttgtttcaagtgtttctttgtttttcagtgtagcactaggcacacacactaacgggattcactctgcagtcgactgccaaaagtttgctcagtttttcacactttaaatttagacgattgtatcacacacactggcccatgcaaatgatagcactagggactgtttagactttgtagctgtcactgggactgcttatagtttgttttgttgcttgcttttgcttgtctgttgagctcttattgctggcgaatttatcaggactttcgtttttataaactagccgttggtgtgaccgtgcgcgcctgtcagctgttgccattcgcagcgagaccattcagctgacggaaaacagatgtgggtggtgtaaagcccatgggcaggtgttggtgacgtttctggggggtcgagttagaacgaattattttcactagaatattttcatttttctaaactgcttaaataaactgtccatttcacgcaacgctgacaaactgtaattttgcagcgtttaaatcaaatatttagtatgaccgaatccggcttgatgcaaataattcaccacctccagcattcaccgcgaaacgcacccactgcacagctgactgataacacaatcggaaggggagaacttcattttggggtatatttattttgggccacaattagttgctagcatttgattgaagtagctccagctccattggcttgtttgtaaaatgccctagagttcgctttccaacgccgcgttcattgattcgttcgagttcagttgcgctagtcgctagttcgatggctttacgcggaatccccgcctgagatagacagccaatctaactaactaagaagcgctggttgtgggtgctagtggagccaggtgggtggtgctttactgctggagtctctgaaagccagacaacccagccagtcccggataggccataagtcataatttccagacggcgcacagctaccaaagagccaggcacgcacagcaaagatgaaaatccattttcgggaacagtacggaagaaagggggaggaaatcctctatgtgacgccagcaggtgagcaaatcgatcaaaccaacaagccaaaaaccttgcaggcgaaaattcagtagccatacagcagcagctataggcactaagaaacttaggaaacaccattggtactgttcaagcttcaatttctattaattattaatcttgtttattattattattatttttgtttggaattatggcgttttacttgcaataccctatattttttatagcatatcgacttttcagacaaaattttgttcaatgccatcgttctctttgctttgttatttatttatttaggtaaatgtgtataaatatattctgaaacgattaggttggcggttaattcattaattaatttgtatttccaactccagatcagagcaacattgtgcgtgtgccgctgcgtggggataagctggtcatccaggagaagttcctgctgtttcgcgtgctgcagaaggtcttcctgcccaagggctatccggatagtgtcagcgaggactatgcagcataccagatctgggacacggcccaggccttctgcagcaccatctgcggcaccctgtgcacacacgccatcttgaagggcatcggcgtgggcagcgagaacatcaatgccttttccgcaacggcgacttggatcttgaaggagggcagtggtcacgtgggtcgcattgtgttcgcatggtggcagggctcccaattggatgtggactcaaagaaatggcgcctgcgtgcggattttctgaacgatctggccatgggcatcgagatctacgtgcttcccaagtatccgcatttcagcacccaaatcctgtgctgctcgaccctgctgaaggcgattgtgggcgttgccggaggtgccactagatcggcattgacccagcatcatgccttgaggggcaacctggccgatgtggcatccaaggacagttcacaggagacgtgcgtgaatctggtggcctcctttgtgggcctgtatctcctctcgctgatcaagagtcaggcggtcctgtataccatattctacgtggtggtcagcctgcatctgtatgccaatctgaaagcagtacgcgcagtatgcttgcgaagcttcaacgagtcgcgctatttgatcgccctggaggagtttttcaggtcgtcaaggatgctcagtccgcagcaggttggtacatcgttgatcttgtcgaaaaataaggttttgttcagctttgactttttttctaggtgaacgccatggagcgtgtgacggttggccaaacggtttcagtgtcactgaacataaagctcggactgagcgttaaaaatttgattgacgagtacaagagcagcagcgttattgagaacatagtgtcctccttcgatccccacgagcacttcatcatcgcacagaccaaaaagtgtctgggtgtatatctgcactttgaaactcgtccgcaggatgtgctgaaggcgtacttctttgcagtgtcctatttgcaggacaggaatcagcttaaggagaaatactgggacattcagacgaagtggcaggagtttttggcgctggcgcagcaagagggtagggataaattgatttcatttgtactattagtgctagagccctaattaattttactatgtattataggttggctaatccatcatcacttgctgctggtggacgaataccgtttagattggaaggtgtaggagaatggtgactttgattgctagattttgaccttagttgcttgctttgacctgaagaattaatttcattagacttcattatcattctcacatatctcacatggctaccatagagcgaaaacattgatattaactaagtgctattgatatttacctagatttagctttgtgaatctcgttcgcacttgaacatcttccaactaactctgccttagcacaaagtaatgtttgtaaccgatatttgataagctaatttcgccctgcttttacccatgaatttatcggaagacattgtttcaattattagctgctactaggactaaaggagacacaaaagaaaatcaagaaactattttgtaaggacttattgtaagtatgcacttcgatatttcgagagcatacaatacatttttagatattagtcatgaagaatctcacaacgaactacggaaaacccgtttcaattgcattctgagcaaaaagtgtacaaagttttaagctttttttaatgctaaatgtgcaatagtaagttaaatattagcttcgagtatatacggaataagttggcgtccatttttgcttaactaaaatgcttttcaatgaatgcaatatatgaattgtgtgcataccgtctcaccacgcaaatgattttaacgaaacaaataaaagtaaacaattttaaggacaaaaatatttatatcacattttttaacaataaacattttaaaaattatacattcgttttcaacattttaaattttttgagagcggtataaaccattgccattcgcaacggctcgatgtattttatttatgactgtgaatgttattttagaaagaagaagacaacacgtgcgtgcattcaacgtgtgtattctcagttgatattcgtttccctgcgatttcagcttgattaaggaattgtctaactatttaaagttaaataggcatggagagtgagcagccagcggctgtaaaggcttcagctccaattgaagagccacaatccaccgaaacagctgttgaattggggaaacatagcaccttgaaggcagacttatcaatagataagttggaaacagcgacaacaggtaagcttataagctttctatactataagttcaataatagatttggaatttcaatgcagaagctacgaatgccgtagtagaaccagtagaaatggagcagcaggtggaaaatgaactggtaaatgagtcaacacaagccatgacatcgaccacaacccaggaaaaggtggtgggttcagtgaataatcttgtagaggagcaacagtgtgtggaaatggaattcgaaacatcatcagatctcgt

SEQ ID NO: 42476 - DNA, 1939 bp, DROSOPHILA
tattttgggccacaattagttgctagcatttgattgaagtagctccagctccattggcttgtttgtaaaatgccctagagttcgctttccaacgccgcgttcattgattcgttcgagttcagttgcgctagtcgctagttcgatggctttacgcggaatccccgcctgagatagacagccaatctaactaactaagaagcgctggttgtgggtgctagtggagccaggtgggtggtgctttactgctggagtctctgaaagccagacaacccagccagtcccggataggccataagtcataatttccagacggcgcacagctaccaaagagccaggcacgcacagcaaagatgaaaatccattttcgggaacagtacggaagaaagggggaggaaatcctctatgtgacgccagcagatcagagcaacattgtgcgtgtgccgctgcgtggggataagctggtcatccaggagaagttcctgctgtttcgcgtgctgcagaaggtcttcctgcccaagggctatccggatagtgtcagcgaggactatgcagcataccagatctgggacacggcccaggccttctgcagcaccatctgcggcaccctgtgcacacacgccatcttgaagggcatcggcgtgggcagcgagaacatcaatgccttttccgcaacggcgacttggatcttgaaggagggcagtggtcacgtgggtcgcattgtgttcgcatggtggcagggctcccaattggatgtggactcaaagaaatggcgcctgcgtgcggattttctgaacgatctggccatgggcatcgagatctacgtgcttcccaagtatccgcatttcagcacccaaatcctgtgctgctcgaccctgctgaaggcgattgtgggcgttgccggaggtgccactagatcggcattgacccagcatcatgccttgaggggcaacctggccgatgtggcatccaaggacagttcacaggagacgtgcgtgaatctggtggcctcctttgtgggcctgtatctcctctcgctgatcaagagtcaggcggtcctgtataccatattctacgtggtggtcagcctgcatctgtatgccaatctgaaagcagtacgcgcagtatgcttgcgaagcttcaacgagtcgcgctatttgatcgccctggaggagtttttcaggtcgtcaaggatgctcagtccgcagcaggtgaacgccatggagcgtgtgacggttggccaaacggtttcagtgtcactgaacataaagctcggactgagcgttaaaaatttgattgacgagtacaagagcagcagcgttattgagaacatagtgtcctccttcgatccccacgagcacttcatcatcgcacagaccaaaaagtgtctgggtgtatatctgcactttgaaactcgtccgcaggatgtgctgaaggcgtacttctttgcagtgtcctatttgcaggacaggaatcagcttaaggagaaatactgggacattcagacgaagtggcaggagtttttggcgctggcgcagcaagaggggttggctaatccatcatcacttgctgctggtggacgaataccgtttagattggaaggtgtaggagaatggtgactttgattgctagattttgaccttagttgcttgctttgacctgaagaattaatttcattagacttcattatcattctcacatatctcacatggctaccatagagcgaaaacattgatattaactaagtgctattgatatttacctagatttagctttgtgaatctcgttcgcacttgaacatcttccaactaactctgccttagcacaaagtaatgtttgtaaccgatatttgataagctaatttcgccctgcttttacccatgaatttatcggaagacattgtttcaattattagctgctactaggactaaaggagacacaa

SEQ ID NO: 42477 - protein, 421 aa, DROSOPHILA
MKIHFREQYGRKGEEILYVTPADQSNIVRVPLRGDKLVIQEKFLLFRVLQKVFLPKGYPDSVSEDYAAYQIWDTAQAFCSTICGTLCTHAILKGIGVGSENINAFSATATWILKEGSGHVGRIVFAWWQGSQLDVDSKKWRLRADFLNDLAMGIEIYVLPKYPHFSTQILCCSTLLKAIVGVAGGATRSALTQHHALRGNLADVASKDSSQETCVNLVASFVGLYLLSLIKSQAVLYTIFYVVVSLHLYANLKAVRAVCLRSFNESRYLIALEEFFRSSRMLSPQQVNAMERVTVGQTVSVSLNIKLGLSVKNLIDEYKSSSVIENIVSSFDPHEHFIIAQTKKCLGVYLHFETRPQDVLKAYFFAVSYLQDRNQLKEKYWDIQTKWQEFLALAQQEGLANPSSLAAGGRIPFRLEGVGEW

SEQ ID NO: 42478 - DNA, 3110 bp, DROSOPHILA
agtggcagcttattgacaatgcatactctgcaaacaatagtaacttgatcaatctggacacaaccaatcccactgctgctcctcaggagccggtgcgtgattttggtcagctgggcgaactattgcgtcagcacatgaatgaggaggctcgcgtggagcaggcttcggccaacacccagactgctcaagttgatacggtgagtacatcgacctcgaccacatcggtgaccaccaatagcgtcggcacctccccagcagctcccgacgacaagcgcacggtccccgtctaccacactggtaagtgccgaattaaataactaatcgctttgtattaattatgtctcctaattagatgaaagcatcaataaatcgatccatgccatgatggccatgggtttcagcaacgagggcgcctggctaacccagctcctagagtcggttcagggcaatatctcagctgccttggacgtaatgaacgtatcgcagaaccgcaactaaatattcatattcaatatcgatatatctacaatgtatcttcaatatctatagaacccaatgaaaaagggattttactttatcgtatcagtttactacgtagcttagtttttctgtggtgctagatttatctcgtagccaaaataaatgtgaaaatagatatatgttatgttttaaataatcaacaaaatgttatcgtatatatatgtatgtgtgaaattgcaataaaggcacaaagtaaaatgatttaaaatgcctgctttatacctgatatggttttgtttagtagagtacgattgacagacaacaaaagcctcctccacttagataatgtgtttatacgtatggtataaatcgattctggtttttcagagttcaaatccgcaaagcactcgaattatttcttgagtgatacacaaatccacaatactgtgtttcggaattcgattcgtttcctgtagtattgatattccagtgtgaacactactcgcttgtcgaaagagcctcaaagatcttctctagcttctgctgcatctgatccaataaaatagtctgtcgccaagccggcaacatctcgcacaaatctccggagttcgtaatttgcagtcgtaatggtggcaataaatgtgaaaaatttgaagagcttctggtggtgtgccttccactgtcgccgaccgaatcccgtgttatatccgaacatttgagataccatcagaacgaggaatccggacaatccgaaaaatcgatgaagcattttcaaggcgaagccactgttgatgaaatacagcggaagaccgctcagaacgctacccagaagaagagcacaaccgattatacctgatgggcgaaagatggaggcataaattatcattatatttgggaaaagaaccgacgagaacacaccgtaaaaagcatggttgctcttaaagtgacgaacggtggcattggggtcttcccgtttgcgctccagcttctgccatgtcttgattccgattccgccggctccgaccaggaatgccaacagccccaggacggcgtgcaggcggttgaggttcaatggacccaacgaggactccaaatatgcgctattccggaccagcaatgcttcgcccatgaaaaacacaaactataatgaaatagaagatagatggaacaatgatttaggacgggtaaaaatttcaggagatagtaaaccagtttatatttaggtcttccgggtacagaaaactctcactcgagaaatatatatccttgaaaccattagattatttgttaaccgtggcctcaaactttcactttttcacatatgtttctaaatcttttaatatccgaaatcaaaatacttacgccgattgtgcagtagaaggcatgtccggcggtgtgcaccaatttgagcaccagacacttgtaaacaatggctacggtgatccccgccagaagcacatgcgagatcagtgtgcagaagccaaagtagaggcctccataggaaccttgcaattcggcagttgtcattatgctgaggatgtcttagctgtgcgaaaatcacttatctgctacgtgagatgcgcacgtagaaccgataagacgaatccaagtatttgggcaccataaaccgaaaccgaagatcgcgactgctcgtggcggttgttagaacgcttttgagagtctgacggcatggaacagctggaaaaagccatcgaaagctccgccagcgttatccgaaaaatcaaactttcaaagccagtggagcgcggcgtttgcaaaaagtgactcagcggatcgacccgttcacgtgtttttcaccttggggcgggaaaggcggcagcggccacaggtggcagcgattggcattgctctccagctggacgacatgcgattatcggtatttttggagcaatctaaaaccggattggataattgaccggcgttaatcatggtgaatacaccatgagtgattcccaaaaacagagtcaagggtgttgccatttcctaattaaagatcaaattaagtaataacaaatctaaccgaatgttgaataatctctctatttcaagttctgcgtttagaatatatatttacgtagactgaactacgttaaattgtgctttttaggtccaccctaaatagttgatttcgatgatcgatgttgtgaaattgctagcaaaagcaaatgcgagacgaataaacagcaaaaggagaaacaaatagaaagataagaagcgaacaatatgattgggaatatcccacaataacactttcctacagcgcatttgtactaatacaaaatatacggttaaataaattttcatacttatccgactacaaaaataatatctattaaattggtcatttttttgaggtagcgttatgagatttgaaggagaggattagcagagtttgagtagctctacatatgtaccatagatagttctgtggattcatttctattttcatttactttagtgattaaccgaagagatagacataatcgcgacacatgtccatgtatgccttactatctcatatttatgtatgtagatgccagtttttcggctctccaaacttaaaatataccgactaggaatttggaataataaaacattttgttcagctt

SEQ ID NO: 42479 - DNA, 823 bp, DROSOPHILA
cggtttatggtgcccaaatacttggattcgtcttatcggttctacgtgcgcatctcacgtagcagataagtgattttcgcacagctaagacatcctcagcataatgacaactgccgaattgcaaggttcctatggaggcctctactttggcttctgcacactgatctcgcatgtgcttctggcggggatcaccgtagccattgtttacaagtgtctggtgctcaaattggtgcacaccgccggacatgccttctactgcacaatcggctttgtgtttttcatgggcgaagcattgctggtccggaatagcgcatatttggagtcctcgttgggtccattgaacctcaaccgcctgcacgccgtcctggggctgttggcattcctggtcggagccggcggaatcggaatcaagacatggcagaagctggagcgcaaacgggaagaccccaatgccaccgttcgtcactttaagagcaaccatgctttttacggtataatcggttgtgctcttcttctgggtagcgttctgagcggtcttccgctgtatttcatcaacagtggcttcgccttgaaaatgcttcatcgatttttcggattgtccggattcctcgttctgatggtatctcaaatgttcggatataacacgggattcggtcggcgacagtggaaggcacaccaccagaagctcttcaaatttttcacatttattgccaccattacgactgcaaattacgaactccggagatttgtgcgagatgttgccggcttggcgacagactattttattggatcagatgcagcagaagctagagaagatctttga

SEQ ID NO: 42480 - protein, 239 aa, DROSOPHILA
MTTAELQGSYGGLYFGFCTLISHVLLAGITVAIVYKCLVLKLVHTAGHAFYCTIGFVFFMGEALLVRNSAYLESSLGPLNLNRLHAVLGLLAFLVGAGGIGIKTWQKLERKREDPNATVRHFKSNHAFYGIIGCALLLGSVLSGLPLYFINSGFALKMLHRFFGLSGFLVLMVSQMFGYNTGFGRRQWKAHHQKLFKFFTFIATITTANYELRRFVRDVAGLATDYFIGSDAAEAREDL

SEQ ID NO: 42481 - DNA, 2941 bp, DROSOPHILA
gttgcagtcgtttttaacaaagaacggctttaatgaaaatcaccttgatttcactgcggatatttatacaaaattttcgaccgtgcggtgaactgaagacccagggctggtaatcacgaataatattatagaacttacttacgcatctggtttccaattttattgtatgccagggtaatggctcctaaaagtagtgaaagttgtttgctatttaaataaactcttcagtttactttattactgcacccctgtcttatttccctatatgttcatttccatattcttttaatcgagtatagcctatttgctaaccaaatgcgctacaaaggaggtctaagtacggatttcaagtaagattatgaaatacgaaccatttcttgtttgtagaatttattggctgtcagtgtcgttccctattgaaacatttaatttagtgatgaaaacaactaaatataaagattaaattacgaatattttgaaaaataaataataaatgatacccagaaggttttagattagttcatgattagataaccggttatttacatttattaaaaaatattaatgtgtaatttaaatacttatttttgcgaacatgtcgacataaatatgtaacgctctacctttgtgttgaaactgtgaagatttcaaatttatcaacttcctatgtttttccgccaaagtagtaatgactgtaaaaaatgtatgtttgcaattgcctacttttgaaataagcagctaactggatttgttttaaaacgtcatggcagcctagacgaaatacggtctgcagcttaacattttgtgtcacaaaaataaaataaataaataaaaagataataattattttgagcatcgcgcatgtgatgtagaaaaagtcttacccgcgcccatagcccatcgctagagccaactatcgatatatatagtatcgattttcttattgacaatcagaatcagctgtctagttgtataatttttgatgtgaggtgaggaaatggcatgcgccaagaaattgctttttcgcgttttcctgaataactctttgacggcgaaccgcacaatcaccatgtccgccgcgcgacgtgccgaggaggccattgagaagctgaaggaggacaatccctactactccaagtacgcgagcaagattgccaagttgcagcagacgtcggctgaggagttcctggatcgcgtggagcgtgtggtgaatcccatcaaagatgggcagagccaggccaggtaagctcagtattcgggcagaagacaatccatagctgatcccttgccaattccaggtcctactccgagcttctgaatcccaagcaaaaactgcaggctgagcaggcagctgaactgccccacaagaagctcactgatatcatgaaactggaactgattgaggacaagaccgccgaagaggtctcccagatttggctggagtaccataagaccaaggaggtcctggccgccactctaagcacatctcagtacgagaacctcatggcgcgcgccaaggagcaccccgtctttctgctgccactgccccgcagtgagggattcgagtttgtcatgctccagttcgcagccaacaccgtgcacttcactccgcttttggcgtaccaggtgcaccatgagaacgctccggagtgtctcacagtggttcactataccgaggtccaagacaagggtgtagttctcatgcgcggtgaatacgacactaaggtactcacagcccaggaggctcagtgtctggccaatgagttgcagatgttctacctgaagcccgacgagggcaagctgcgcttgctgaacacttttacccgtaagccggacgagttcaagcacatggatctaattaaggaagttgagaacatacagctggtctaggccctgcgattttaatcaaaataaatagaacaaacacgacaaggatatattaaacacgaaacagtattcgttttgcaaattttaagtcctaattaatagccaatgcacacaagatggagcactttgattcggtgatggaagatattggtaaatattcaaaagtcaagaaacgctttgcatgcacaagcatagctcacgcccacaggtttcggaagggtccatctctttgccactgtgacactcggtctcctgcagatgctcaccatccaagaaacaatgggcatgggcatcattggtccggcggccgtctgcgatctccgcatgaatgaggcgcagttggcctcgttaacagcggccggctttatgggcattatatgctcctcttacttctggggctacatcactgacaagaaaggtcggcgctggacccttttgcggaccattactataagcaacttgtgttcactggcctcaatgtttacggtaacattcactggcttctttgtcatgcgcttcatcacatgtattttgtgagtaccatgaggagatcgaagaccacagtgtacacttagaaatttacgctttccttcagtgtggccggaccaagcttcgtggcagccacctacctaagtgagttctgttcgcaccggattatggtccgttccataactcacttgtacatgtttactggctttgccatgatctcgtgccctgcgtgggctacgctctttctcagctcgggcttaatagagtttgaggagaagttagtgggctccttgacactaagaccttggcgggttttgggttgtttgtacattctgccgggtgtggttgcctttttgctgttgctccttttgccggaaagccccaagtttttgctaatgattggtgagacgaaaagaggcttagatactatggagtggatatcccgcaagaacaccggacgtactcttagcgaggatcaaatgaaacgtttgctcgcctaccaggagcacgttcaggtcaagcggcggaaggagcatcagaacttctttcgctccatgctggacga

SEQ ID NO: 42482 - DNA, 885 bp, DROSOPHILA
gcatgcgccaagaaattgctttttcgcgttttcctgaataactctttgacggcgaaccgcacaatcaccatgtccgccgcgcgacgtgccgaggaggccattgagaagctgaaggaggacaatccctactactccaagtacgcgagcaagattgccaagttgcagcagacgtcggctgaggagttcctggatcgcgtggagcgtgtggtgaatcccatcaaagatgggcagagccagtccaggtcctactccgagcttctgaatcccaagcaaaaactgcaggctgagcaggcagctgaactgccccacaagaagctcactgatatcatgaaactggaactgattgaggacaagaccgccgaagaggtctcccagatttggctggagtaccataagaccaaggaggtcctggccgccactctaagcacatctcagtacgagaacctcatggcgcgcgccaaggagcaccccgtctttctgctgccactgccccgcagtgagggattcgagtttgtcatgctccagttcgcagccaacaccgtgcacttcactccgcttttggcgtaccaggtgcaccatgagaacgctccggagtgtctcacagtggttcactataccgaggtccaagacaagggtgtagttctcatgcgcggtgaatacgacactaaggtactcacagcccaggaggctcagtgtctggccaatgagttgcagatgttctacctgaagcccgacgagggcaagctgcgcttgctgaacacttttacccgtaagccggacgagttcaagcacatggatctaattaaggaagttgagaacatacagctggtctaggccctgcgattttaatcaaaataaatagaacaaacacgacaaggatatatt

SEQ ID NO: 42483 - protein, 254 aa, DROSOPHILA
MSAARRAEEAIEKLKEDNPYYSKYASKIAKLQQTSAEEFLDRVERVVNPIKDGQSQSRSYSELLNPKQKLQAEQAAELPHKKLTDIMKLELIEDKTAEEVSQIWLEYHKTKEVLAATLSTSQYENLMARAKEHPVFLLPLPRSEGFEFVMLQFAANTVHFTPLLAYQVHHENAPECLTVVHYTEVQDKGVVLMRGEYDTKVLTAQEAQCLANELQMFYLKPDEGKLRLLNTFTRKPDEFKHMDLIKEVENIQLV

SEQ ID NO: 42484 - DNA, 21379 bp, DROSOPHILA
cacaacgctcgacgtttcgcagcggctttgctttcgcttctcttctcgcgcgtaaagcggtctccccaaaaaaaaaaaaatagaaaacaaaaaatataaaggaaaaccccctccgtagacagacaaaactcaaagtctccaacgactcaaagcgcctcagtcgctgccgctctgccgccgtttctgtcgacgccgctgcccgcgctggcagcaagaattaccaattacacgaaatttttatactcttttaaaaatttcgttttattataatatttattatcgtggcgcgcagtagtgtctgcggaactcagctctccactctttggaatttcggccctccgattccgattcggattatacgattatacgactatacgactgtagtgcggcaatacgattcagtttccgattcgccgtgtttattgttccgtttcggccgccggcttattgtcacttaaatgttatagatcgcgtaaaatataataaaattgtgtgtgaaatttaaaaccgaaaaaactgtcaaaacactatggtttataactcactgtgtgcggttcgtaaaaattaaaaagacataaagttgacatcgtaaaaaggttctcgcctctccgttccagacttcgatagttctacctgcaaagtgttttatgacattttaaacaaagtaattaaagcaaaacgttgggagaaagcatttctccggccacacacacactcacgcacttgagaagtcgttaaaagccgcaggaaactcactctgccataaaaatacaagagtgccattaaaaaagatcgcgcgcctataaatcacacgtacgaaatcccgccggcacgacgtccattcgaatttccgcgtaattgatgaccgcattttaattgcttttacaacaaataaaagatacacacaccccaaacacacacatgcgacacacacacttgtgccacagctgcaaatacaacgcaacccgagaccatatgcaaatttaacaaatttcgttgtgaattcgccagcttcgagcgaaaaaagtaacagaaacagaaaagctgcaaatacaagctgctcgccaaaagttcgctagagaaaacttgagaaaggtaacaaaatgcatttcacttctcggaatcgagaaaagtagcttaaagtcgggcagctggcaaagtttccgaattctgtctcactaactctatctaaaaagtactaactgttggccatctcatatagtactgtaaaagtaacccacatactaactcgttggcactggcagggaaatctagctgaaaaatatataaagcatttggattatatatttttttcacttgagttctgtatcatgctacccgaaagatttatgttcaatccaaacatattcaatttggttaatgttctttttatggtttccgagtaatttttataaacatgttatattttttgttttgccatttttaattcttgtttatcacattggacgccaagtttatttttgtttttagtaccttttaattcgattaattttgttagtgatttatatactaagtccaatgtagtttgcattcgattatgaagtagaaaagttaaatacagagacgggagatgttcattaaagacaagtaaattttaatagacattgatacaaattaaattgctgtgtaaatcttatgaaaaagttaaagaaaaagatatttttaaaatgctatttctcacagtgttgaattataaagtcattcaagtttaagatttaggttgtgcttacagaagtagtcggaacttttgttttattatggctagaaagcgctcctctccacgctgaattcaaacaaaatttgttaaagtcacacaaagaggaaactttaaattataaaacgaaatactcaatctagccattaaccaaacgactcagataaagaacccaaatcattcgaactcagaaatctccgaaactaaaatagaacaacaagtggactaaacgaaattccgaagatccgatcctcggccagagagcaaaatatgtgcaatgtcaaaatttgttttcgatagtatgctgccaaagtatccacagttccagccgtttatcagttcgcaccacttaaccaccacccccccgaattcgtcatctgcagcagttgccgccgccctagccgccgccgccgcctctgcatccgccagcgtttcagccagcagcagcagcaacaacaacagcagcaacacgatcgctggaagcaacacaagcaacaccaacaatagcagcagcagtccaagcagcagcagcaacaacaacagtaatctcaatttgagcggaggatccctatcgccgagccatttgagccaacatctgggccaatcgccccactcacccgtctcctcatcgtcgcccttccagcagcaccacccacaggtgcagcagcaacacctgaaccaccagcagcagcaacatctgcaccaccagcagcagcaacaccaccaccaatactcctcgctctcggccgctcttcagctacagcagcaacaacaccacattagcaaactagccgccgccgcagttgcctcgcacggacacgcccaccagcaactgttgctaacgcccccgtcagcgggcaattctcaagcgggcgacagcagctgctccccatcgccctcggcatccggtagctcctcgctacaccgcagcctcaacgacaactctcccgggtccgcatccgcgtccgcctccgcatccgcggccagttccgtcgctgctgctgcagccgccgccgccgctgcggctagctcctcgtttgccatccccaccagcaagatgtatccgtacgtgtctaaccaccctagcagccatggagggctctccggaatggccggcttcaccggactggaggataagtcgtgcaggtaagatagattgccctgtttaagtatgggataatgcagatttttataaatcgggatgggttttatgtccaatcgtagtaaaatgatcttaaatgaccctaataggaagtgcaaatataaagtcaatgacaaatgatctatactatctaatatgatattcaaatatttggagtgcattgatagaacttctcagacagtatcatattttaaaatatatgcaaatttagtatgaccattagctttacctggcttcaaaacctttaagaagatgtttccggggttgaaaatacaaaaaaaaagaaacactcagctcttccaagaactaatttcgcgtgctctcaatttggcgagcggaaatgccagtcgagaccttcagtaaaatctgcaaacactgcaaaaccgcaaatccgtttcgaatgcgctctaattatcgggtctcggatcctgggactctgtccattttcctctcggccaccggccattcatattgaatggccataaagtcggaaaattagagcagcctgtggtggccgctggcaatttgtcgccggccacaagattcgcacgcacgctgaccttccgctgcggccatttgcatattagtactactgtatgggcactccatgtgcatgtacagtgaaccctgctgtgcgtgggcgtgttcgggattagtgtgcaattagagctaaccgcagtttggtgaaaggggcatgcaaatggccacctcattagcatttgactttagtacgggcgctggagttgggaacgtactatgagagcagggatcaccaacaataatggctactttctctctcccacacccacagcaggtacacggacactgtcatgaacagctaccagtcgatgagcgtacctgcctcggcatctgcacagttcgctcagttctatcaacatgccacagccgccgcatccgcggtatccgcggccagtgccggcgcgatcggcgtggactcgctgggaaatgcctgcacacagcccgcctccggcgtgatgccaggggcagggggagcgggcggagccggtatcgccgatctgcccaggtatccctggatgacgcttacaggtgagtcaaaactcgatactcgatagtgcggagatatattatacataagtaaaaaaataactgccagattcggactctttgtgaaagacttcggatctgaatgtgagtgccaaatttgataaatcttgaaagttatccgatttttagaattgagaatcacacatatcccaatacaagtttatcacactgagccaatcaatcagtcttttaaattaagagtctgtctatcgtatctactgtgttctatatatcatgccaatcattataaaatcagaaataatccgtgcacttcagggaatgtatatcgtcttaaatcaagaataaattgccttcaagatctacaaagcgatctcttaaaattttttgtgtacatataaatcatggccacttacactgaaatcaaaaaatcaaataaaaaattgtaagaacttatattggattgaattatttagtcgctatgttaggttaaatactataattaaaaaatttaaacagctaagttgtttaacaacccgtagacttaaaccaggttcgaactgatttacaaattgtatgacctaacaaaaagcgtccagtcgaattatcgaattaaatttcccaagtgtagtatttggaatggttgctgcgtaccttttataaacaatagataaacgtggcgcaaacgttccccaatagcattcccatttgcaccgccatttcgcctacaattccaattcgtaatgaacactttgcggagcacttccaagtcgtttatttcgcataagtcttccaggcgattcgaatccgtaaacgaaatgaacgaagagctaaaaagttggcagtaaataaaaatgaaaatagtttgagaaatgcttctcttgtctgtcgtgttatttggcgtcgatttgtaatttaaatagcctcaaggttgccccacaccgacaaacgtatagcccaaaatgccgaccaaaaaacactgcgatgtgccccgcgcatacaaaatccacatatccgtcgagagatacagatacagatactttttggccgccgctctttttatgcggctaacgtagtacgggcgaactcgcttcaaatttatgtgggtcagtttaatttacgcgatccgctcgctttttccgcgcattttgcacagcagatttatttatcatttctcatcaggccactcgatttccacgctgcacaagaagaaattgaacgaattcaattttccattctgccccgcgggttgaatgcctcctgattaatggcagacaccatatgaatagactgtcaattggcctgacttatggactgcacatcggtcgtcgtaatagaaaaagatcgcgcgacggatttacgcggaatttacggcataggcatgttaattaaacagtataagtaattgttaattgacgatctagcagacagagtttaaataatggcattaatacgagataacaaggtagtgtgcttaagggtccaatgtttatcaagtggtatattttgtcaaatcattagaacttaaaatcatcgagaaaagaggttcaaaagtttctcggtctttttttttttgccagcataatttacatatttgaccagatttgggtgtcaataaatcgataaccagcgctcctattaatctatgcagattaaaaatccattcctctattttagtgggtttctggttcgtcgataccccgaaagatattaatatgtggctaacacacctatgtatttggccggccagctaatagatacacacattctgcaggcaaaacctgatggtgaaaagaaaacccgaagcatcggccagttgggaagataaacggtatttcgcacaatgaaatattttgcatatctcccgctcacagcgccaaggcgataaaattgtcaacgagatcatagagacgcgactggcggcgatgaaagtaaatacgagcatgacgccattatggcagccaagtgcgcgacacgtcgacgcagccccctttatccaccactccttaaatgcacatgctgtacataaagctgtatatacatacgtacgaagtatatatgcatgtgttttggcactatatccatgcacttgcatgtggattgcacaagaatcgcttcgcctccttcggaaaagtcttttcgtttggctttcactttgccaagcctgcgaacccacccaaaaaactcacagacgaagaccaagacccagacccggacgcaccggcaacatgaacaactgcaacagcaactgcaacaaccattgctgcaacaacggcaacgttttacagctgaatgcttgccaaatgcaatttaactaatgaattttaatattttacgccaaagcgtctgaatgaattttcattttcacatcgttgcaccgactccgacaacaacatcaacaatgttgccaagggggcagcagcgggaaatcgcaggaaaagctggaaaatgagtagagctgcgcgcctgcacctgattatgctgataagaagcaaagaggttaacttttcttaattatctggaaaagcgcagcccgacaaagcatgaaaatggcaagtttcccatcgctatccacattgagaattcgcaaactcagcacgctccgtggagaaaggaggaggtggacacaaaaaggttaagaagtaggcacactgacagaaaacgtgcagtgggttctaaaaacccgtggatatatttactgactcaaaataattaaattcttgttgaagaaacatttttttcagaaatgtaaacctataaaatacattcctagttattcagcacaatagactttggaattttatattgatattagaagtttgttatgggtccgagtatctattaacgtattttcgtccatgtgcagtcagaacactgacttggctagataagaaacgtctgcaccataaattgtacaatcatcagtgcgacaaagaagtctcggcctgcaaaatctttgcacatattagagattgtctgtgccccgtccgtccgtctttccgtgtgtcaaataaagtggcaacaacgactggcgaatgaccagaaatttgtgtattttaattaaaaatgcaccaacgatgccgagcagcttcatctgcttattaattaggaggagtccgtctggtcgttggctcgcatcatcattctcccctccatcttgcagtgccttgactagtattttcctcatatctccgtcgatatcgccgacatcttctcctcctccaggccgaccatcgtggtctacttaaagtggagccggtccaactggccggaggttcactcggccggtggtccgccgactgccgactgcattgggccggctaatgctgctttttgtggctggcgctgacaactaaattgaaaacggcccgattgagtggtttatgaaagctgccatgtggcacaaatgtccgagggggcagtggacagatatgatttgagggatcgacgctccattactcagcgggatgctctcaaggctgtttggcgcggaatttcgcattagcagcacatatgagaagcacaactccttagttccttagaaaaaaactcaaagaaaaaccgaaaattaattgcttttctcttcctcctttttttaatttcagactggatgggaagccccttcgagcgtgtcgtttgtggcgatttcaacggtaagtaccgcaattaaccggaaacccttgaagttaatatcccgactgacattgaagcaatgggttatttcactaatcggccgtggaatatgccggaaaatgctgttttttagagcctgcctagatggccttgaaaaatatgatttacctgctcaacccagcgactttcacccgctgaaggaaacccttctttgtaaaatgcagcctgcaatctgccgtcacatgactcctgctgtcctgtcataaatccctcaacctttgttctcacatccttgtcttattcattgtataatttcattgtttatcggagtcatcttctggctaatatccaaagcaaccaatggttttgaagccaaaggtttggacgtctggcaactgttcgctttctatgttgatttagcaaactccgtgaaagttgcaccgataactcaaacatgccggtcaagtacccgaccaagatcgtaaatcacaattccaatgctggggccccccaaactgcaagctgctgttgtccataacaattgggcgaatacctaatgagtcgatctcgatgtcagaaaaactcactcaaagacgggctctcgattgatcgatttgtacgatcgccgatctgcgatgggtccgttgttctgggcctcgttaaacgtctttttatgggcgttttatgatctatttacgattttacgcatggtcttgtgccgtgcataacgatcgtaatgttgcggccactgtcgaacgatccccgttttatggtcccgataatggcgttgattgtttggcgaatcaccatcgcgtttaattagttcgacagtcgacaagggcagccgcaaacacgagtagccactgtcaattgctggttacaaaaggcggtcattaatcggtattcacattcacattcccaatcccaatcccatctatgtatatgcccatttcacttgagttaatggcgctacccattagtcgcggctcgaattaggggcatgtagtcgaataacaatatggaaccaaagtgtgtttattatttcactgcttggcttatttccgtgattaaagtgggcccagaatttctaatagtaattaacaattagtgttgaccgtaatgactaattaacccagtcgttgcatttgcataacaaataattgttatgtactttgtaaaatttgtttcttccctttatttatattatcttatttatattatgttcgtatttcacaataattccaagcctggctcacaacttaaaaaatcgtaatgatgttttatcgattggaaaatgaatccaaccattcaactccctacattgcgcatacgcgtagtggtccccctagtgacattaacagcctaccccctgttgttggtgtggcatgtaattgcgaaccgtttaattgggctcgaccactgggcaaacattgcggcacatggcccaacaatctgccttgctggtactatggtgtggaggcctctggtcctctggtctttggtatttcttatgtggtctctggacctggaatgaaatcggagcgttcgtgccagagtttgccaccgcagaagtacgtgccacggctcagcttttggcgtcacagatcgtttgatattcgagcggtttcaagtcccctgaacttcccctttgccactggcgatcctctggtgtttgttttgtaaataaatcactggcattggcgttgagcggagtcattcgggcaatttacagcactaacagccgctgtttgacaagtaattaactcaccgagttccagttgccattctgcatagattgctgtggtcgagttttggttgggtataagattacaatcagaagatcggacgacaaaagcgtttctttaagctgaattttacaagttcttacatcagcttagttttgtttcacttttcctatgaaattgaaacagcaaccctagtgtgagtgtaatataatgtaattccccaggtgcgctcccacgacaattaataatttgtaaagcaaataacataaaaatgtcgtaagagaccgattatgttaaattttaatattatttagtcatcatatttcattcacagagctcaagaattgctaattcaatttattcaaacttacatacaagtccttcaatacaaacgcaaacatgtgtaagttttgcatacagtaaaaaacatttctttcggcagttttaattaactattacagttttgaattgttgttactgcaatttgtaagcttgctcctacaatttatggtcagttttaaaagctcttgatttttttctgaaacaaatcactcatttcttttcaaagtccacaaagctattatctatcttcatggcacgatttatttgcattccttgcacagcgaaatcggcgcgaatggaataataaaatatattatttttattaattttacaagccataattgcggctcgcgataatctcgtcagtcggggaattgaattattgccacaaagacctctctatctctgggccagtctcttttctcgcccgcccggcaagagtctctttctgaattgaatgctttgtcttgggatttgaactggtcttgctagaaatcaatgcaatatcaatgtttaaattcaattgttggcggcaatcaatgtcattggcaggggattctgggggcgcgaagatccgcctctggcagataatcgttgatcccgcactggggttaagatccctcagcaccccccacccacttagcatccctctctgtctgcatacgtggtgctatctcgctcgaaacatggacgacggctggcaagggttaatttatgaggcgcgataagcgaattccatttcgtttcggttttgtttaatttccgattctctgtgttttctgttttcctcatttttatttggtcttgttgtatttacatttggtacttctttctctttcttttcaaccaagctatctctctctctgatggggagtgtgcgacaccgtgttatcggcacgttttcggtcgttgtattatttttttgtttttttttttttattatttctgcctgcggtggcggaaaattcgaaatgacacgtttctccgagttttgtgttgtttctgccgttttttaactaccccgtgaggctgttaatctgcggttttaatgcccaagtggcgcgaattggcgaaaggggtttggattacaaggatccggtgcggagcaccacgacaggatgacagaaccacagacaacgacaaaatggcagccagactggcgcgatttttcgtcagtggtagtgggccggcagacatgtaaatttggcccagacaaaatcaaattaaaagcacacacgttccacagacaattgccgactcgatcccagtccatcgctggcgcttaatcaaagtttattcccttcatgcatgacacacagacagaaaagttgataaagcttgctattatagttttcaaaaaagtaattaataaggtttattgaaatattttcatattgttaaagatacatcttctatcttctgttcttaaattagccgttatttattttggtagcactctttttcacagtgcacatttgtgagtccaaacaagcacatcattaggcaaactttacccatttccattaagttaaatatttaatttacacaaaagttttatttaaaacttgactatggcgtgcgacatttttcgagttttccattttctgtatcgcgtgcaatgcgtgactgtgggcattttccgaccatcctgttgcgataaatttgaagacagagagtagttaatattaatttaatcgcggaattaaacaagttgctggcggtgtcggttaatgcacccttgttctattctagcggctaaatttattatttcttctgattaattgcgagattagagtgtttatgatgcactcagtactctttgatgtgccataatcgttgggtaatgtaagtggcaacgaggtaaccgcatttcttgaggatgagaatgtatttaggataggaaaggaatttatttatagtagaattttgatgtttctaagtagatccttcttataatttgaattttaattttttgtgagctcttattttaaatattgttcatatgtacttataagtatatctgtgacaattttaaacgttacaattctgaagaacttcctctcaatttcacttagggaatgaaggaaacgatgtgcctattgtgtttttggtatcttcccctcgaataacttgtttttccagttgttgtctgatgtgagaatcctttcttaccctcagtcatctcacctaatgaagcaattcaggtgattggagttcctccgccatagcttcgttgtaatagttgtgaaaagaacaaacttgaaagggtcgaacactgggggaaataaaaacctgtaggtgacaaaaaacctttcatctgggatcaatgcaacagcaacagccaccatttcctcaaattactctctggcagccattaacaaaaggcaaactgtacgtgtgtgtgtgagccattaatcagctttgtcagccaaagagaatttcgagggaagttcaagattggaaacactaataggtgaggttcgttttctgcggtctgcggtgcatcgacattttctcaggagcccacaggaccacaccttggcatttcgcggggggaaactaaacaggggttttctgtgggcattataatgaaatttccagacgagggggataagcatgagttatgtgcacgcctaggtaaatatagaacccgcatcgatcgatcgatgctttttatacgaatttaagtgtcacgttctcgtttgatggaagttgtgcgggggattagagaggggacaccgatatgggtgggggtgcttcactgaatggcgttttaatacgtcatcgtttcaagtcggcccacgcaatctaacttatgaccgacatctgcccccaagttctgcattcgaatgggaataggaatccggagttcgtgtttgtttttaccaaataggaatatgtatatataggtatatacacgagtgcttggatccgtgtgcactgggccatgaacagagttgggaaaatgagacgaaaaaggcaaggaaaacccaaccaaagcaaacaaaacaccgaagaaacaataccaaaatgcgttctcagtcgaaagcagttggctcaatttatatgtattttcaataaaagtcgatataatgcttgccaaggttcatagaacgaccaaatgaacttggaaacggccacagaaacaaaaaaggagaaaaagaaaaaaccggcggtggcagccaatgaaggcaatcaatttcaattcagtttcctcgcctttcccaaaacgccaaacccaatgagccgtccaaagggctagacgaggccaattgcagatgggttacggcttcagaacctttttggtaccccttatcctgtttaaatggctgtattgaatttctagacaggcttcacaggtatttggccaagcaaggttgtgaaaagataaaaattttaatgctcaactgaatatttaatcatatcattacaatatatatattcataatcgaaattgcattacaaataagctttatataaagtaaaatcctttaaaataaattttgagtaatggttaaatgattgcaactatttcagaagagtacccagtatggtacgtcccaaacgaaacttttgctatacagtaccctttgtcttcatttatcgtccgaaatgaacccctaacaaaggattcaaaaagtgttgatgaacccgaccaccgaccgaatgtcagctatgtcagatacagatactttttcagatacagatacggacaactaattccactcacatacagatggagtctctttggcgccacttcattgtgatcattgaatggccgttgattgtgtcgcatcgattcgcggcgattttaatcgcaggcggcggacattaaacgcctttaatttgcaattaaattgcggcgaacagacagagatagaaaagcggccagaaacagataggacaagggtgctcgagttgcggtcagttggcgacacgtgttccctggaacagcgcttgaaacagacgccgttcgcaaaaatcttacggattaccaattctagacgcctaatgccatttataggccatcgctacaaatgctccacagctgtccgtccttccaaaattagttgggctccagctcgccacccggaactcctcttcttctctccctttctctccgggtgggccaacaaatttattggaaccacttcgccgcgatggtttaagaaggggggcccagaaaaagtctgattttccggtttccttttggcacggctttctgccaaccccacacatacattctgcggctggtttcttccgttttcccttttcacttttggccatatatttttcacatttatgtcgggtattttgtcttatcacaccctcgtgtttgcagtgcgtgcaaaaaatgccaggggacggtggggagttgtgcgatgggcggtatggttgtgccgtccaccacccacaagattaaaaatgccataaagacagtaagggtgaatggctctaatggctgccgttgccgttatttgccatcccactcgcttgcgctctctctacctctctcactccctctttttccgtctcgttttcactctgtgcaaaaagaaaactcgggctgttaccatgttggcttgagttaccatggcttctggtttgagtcagagctgagggctgtctgcactttttgggatacagggcgcatttcgaatatttggaactggcaaatgattatctggcgagataatgggaaaaacatatgagaacattccatacattcgataatgcatcggtaaggtatttttcgaaggagattggctagcattagacatatgcctgcaaaaatttgataagactcaaaaaacaaacgaaattcctaagatttcccaatgaaaatcattgtttttgagttgataaagctttaatacgtatatggtttttaaaacttatcgttaattatataaaatccaaattggaggaactacttatcttttccattttaattgcgaattgtaatacacaatttctttcaaccccaatacttctctcttgcgttaaaacagaaacgaggagtaatttcaataatggcgtgaaatatttgatgagaatatattaatcccccaggagcctgtgtatttgcaacatttgccaggaattttctccacttttgcccgcggaacagaacgaaacacaactgacagcgacagcttgccatatattttccaagattaagcacacaattagcaggggaaatgggacgtcggagttaggggcgtggcagatctgatagcacaaacagcaacattggcaacgcgctgcacataaattgcagagaaggaagactcccccgtaaagcaggctttccgctgccaggttttccgcaaacaagacaccacccacttttcctctctggcgaacgaaatggctgtgagactgattaaatttaaataaatttaataaacataaattatttgcaatggcaaccaggagctgctgttttagccaccccaaaaagtcgagaatgagcgcaatttaatggcggcgcttacctgccactcccccaagtatcctgtgtaccctgtgtctcgtgaacatcctgcccatcctcccccttttcgctaaaagccacacaaaagcgccagatgttgcccgtgagtcttgtcggaatagcgtttaagcggctttactttcaaagtttaattagtcttcgtcgtcgctcaaagaattccacgcatttgcatatccttggaagttggggccgggaatgggcgatagaaacagctccctggggatctcatttatcccgaggtacattgcaatttgcgctaaatgcctgaaagatcgtctccgtaaaacgatgtacttccttaaccagcggagaagagaatttgttgagccatcactaaattctcgcgaccccaaaaatattcctcatttcagagcatgttgctatatctgcgtctgccctttgtttatatatctctcaacatgccatccgggaagttagtttcgaaaattcataccaaatataaacaaatcagcataaaacatatgccagccagtgaaatttcttctctcttgaataagaaaacgagataaatatacgacggcataaatatgcgtacacattggtggaagccttattccttatatgaatgtatttttcctcaaaaattgtaacattttaacccaaaaatgcgtgatttcgataaagatgtctacaaaagacatcaatatcttcatacttaagcagtacaatttttgcttacgtacaaaattctgtaaaaatgtctacaaaatgtgcttttactgacaaatttcgttaaaatatatttgtacaattaaatgccttacatgagtataaattcgctatatagtagagtacgaaattatacttaaattttagtgctaaatcagtaatatattaattttacccacccagtcccataaagtttacgaaaactcacgaattccgctcgaagacaaatacacaacggaatttgcgcgccaaaagtcaacaaacaagtcaaaggcgggaaaagttctccaattccacaaaacttgaatggtcaacagcagcaaaatcatgaaatttatttgccggcaaacaatttgaaccagataggaataggaattcaaattcaaactaattgccggcaactgaaacaacaacaatgcgctgaagcaaaagcacgcaacaatgtttcaaagttctttgtcaagcgatatgtaaatttgtttattatttaccgaaaacgaaagcaagaacgctagaaagggatgggtgcatagaaaaaataggagccaaacactaaacacgaaatacttgtgcggcaaaatgtttgtttattgtacatttttttgtcgcttgataaacaagactcgaagacttgtcagcgtccccacggaaccactttcgaatgcacacatagatactcacaccacacacacacagtgccagatacttgggcaaactatggcgctcgccccctttgagtgtgtgtgtgagtatctttattgtacgctttgaattgtttttatgatttttatgtcatcataagtttcagtctgcgctgttttttttttcagcttctcgtttttgtatgtttttgtgcttatttatacgcgccgctgtttattgaacaattacgtttatgattattaatatttttaattgttaatgtcattgttatagacgctgtcccgggtctgtgccataaccattcccattctcattcccataaccattcccaggcccattcgcaccgttgacagcggcgccttgggacggctttcctggcctttttgtcacctctcggatttcctcagccaatccgtagagtatacagtggaattgcccattgtgggcagccccattttggacgccaacgccaccgcgtctggaatttccttcgattccgaaacagatttctgccctcagctcgattttccgcctggctgttttgtttacccgcccgtcgcttcactcaattgcagccacgatttatggcgcgctaattgatttttaattggaaaatggttttccttagtaattgtgcaacggaccggttcgaccggccacctcaactcgaaaatataaacttaagatagccgctaagcgcttgtcaaatctaccgaagctctcaagttaatttaacgatgagtgtgtaattgaaattcaaccaataacccacttcttatccatgaatttaagtcaattgcttacatcagaaaacttcaaaggtatttttgctttataaatactctgtgagattaatctaacttaatgactcaccagggggcaaattgacgcatgttattaatgaatgcaattaaaatatatttatttcatttgtttttactaattaaacgcttcaattaaatatttttgttttaagcagtatataaacaatagaaactcattcaccctaatcaacacttaacgctttttgaaatacctttcatttctgtaatatttgtactacctctacctatcttcttctgctcctttggctctcactgagctcctccatactctgcttataataaagatttcataatttttagaaagatcaatgaaccctcgaaagtcccccacaacgccgctcgcttaaacactcaaatccgaaacccgaattgaaaccgtcttagactctagacttttcccaagcggatttaaggctttccgaatagttttcgatatgagtggaactgcagttggcattggaaaatcaataacaaagttgggccgtgactcaaagtgagcgctctccttttcgctcagatccacattcacatccacgtgtgagtgctctcttcgcaattccggtttggctgcgccgactcaccactcacactaagaaaaaactcaggcgttgccatgccgacgttttgctctttccctctctctatgacaatgtgtgtgtgtgtgtctacctgtgcgaaggcagacactgcggcagccatgttggattccatcactccgtcctgcgagccagcagccatctcgctcgcacctgcgcttagccattggcggccattgcgggggtcgtaaatcttgtttaggggcgcgtgtgtcctgggagtcgtgatttatgggacgaattgtagctgctcattgtagcgtgtaaataatttagattagtttggtattcctggccacaggatagcagggggaaaacgggaaaggggggttgattagaattgaaattgctattgcccccttccctttacactgtttcctgttcactccagtaacaatgtttttcgcattttattgctgctctccttaaattaaaagcaaagtatagtgtttgtttaacaagaaattaatttaaaagattaatttgaatttaattatcggataatgaaattaaataaaacgattcttttccattttaagacatttgggaccattcggcgtccatacatataaatttttttcttaacatcactgttccgttcatccgaaaaacaggagctggggttttttgtattttccaccagtgaatcaccaatacttcttatcggttgaggtaaattcaaatgtcacggccttattcgcccgtaaatattttgccaactgttcagtctcataaaaaatgcagcggaaactagaaaaaatcacaatgatttacaactgcagccgagcaacatatacaattctgcacctttcataatattacgtaaaaattgtcccttttttattttgtctgcttgaacagttaccgttggaaagtcgcaacttgcaaaccataaaaaattgccgttgacatgaaaaccttttgccagaaaactcggcacaaaggcagcagtgcaaaaaagaagagacatgaaagccataaaacggcaagcgggtataagtgagaggctgttaggctgggactgggacagcaatttgtagatagcgaatttttgatttccgtaacataaacacggagcctgtgccattccgagcgcatctccgcacaccgtcgcgcaaaaaattcgcacaggtagcatggaaaattgctaaaaataagaaacaaaaaactagacaagaaagtagagaaaggaatgcggggaaaatcggggaaaagcgctggctgctggccaccagggcgagacctgccgctgggcgagtcggtgtcggtattggtagcttcaccctttcacgcactgcgtgcgatgccaatccgcagttgaatcaggtccgcaatggaccccggggtgttgacgtcctggggcgccggctgctgacgtcagctctagcatcagatcactcccttctctctctctctctgttaaaacaatctgtttgtttttcccgtaatttgcagtcagacattcgcagtgcagctcagaaatgtacgcccccaacctccaaacccccataccccagcacaaatcatgtgtcgacgcctgacatgtgttgcagctggccaaagtaccattttcgaccgtctgacaccgtcttagcagctcattaggcgttgccgaaaaaggcaaaaacatcttcttaaacatcgttgcaaacatctgacgcaactttctccgttttctcctccgcaggccccaacggctgtccacgaaggcgcggtcgccagacctacactcgcttccagaccctcgaactggagaaggagtttcacttcaaccactacttaactcggcgaaggcgcatcgagatcgcacatgccctctgcctgaccgagcgacagatcaagatctggtttcagaaccgtcgcatgaagctgaagaaggagttacgagccgtcaaggaaataaatgaacaggtgagctggtccttccgcagcaccttaaactcttaactaacttgctttccgtttttaatttacctttaaggcgcgacgcgatcgagaggagcaggagaaaatgaaggcccaggagacgatgaaatccgcccagcagaacaagcaagtgcaacagcagcagcaacagcaacagcagcagcaacagcagcagcagcaacagcaccaacagcagcaacaacagccgcaggaccaccactcgatcatcgcacacaatccaggccacttgcaccactcggtggtaggtcaaaacgatctcaagctcggccttggcatgggcgtgggcgtcggagtgggcggcatcgggccgggcatcggtggcggcttgggcggcaatctgggcatgatgagcgccctggacaagagcaatcacgacctgctaaaggcggtcagcaaagtcaactcctaagctgacaaccacccatcgcccagccgagccaacgagccaatcttccaccagccgcaccactagcaccaccaccgcagccatcgcccggatcagcgtccggcgttatttttcgtctcctcgtctgtgtagcgcgcgagatagcaagcagaagataaactcgataactaaaatacgtaaagttttacatagtaaatagttgcataagtctacaaaaaacatacatacacgcaaatggctgggtgcgatggcttagaggcaattaactggaccgggttttattgctgtggatcgacgctttctgaggtttccccaattgtagttgtctatttgatagagcaacgcatgcgattcccttccagatctccagtggcaatttgtgtattcgacatttcttccatactttcgcttttgcaacccctaaatcggcaattcaacccccagtgtagagtctctgggccaacgggcccaattcggtaatattaatggataacttgaactacttagaatagcggcaaaggcctaaggaagaagttagcaggagacgcgatctatataaatgaatattgacgaaatgagcgatttttgatagtcagagaactccgttgcccaccatcaaccaactttcaatggaagtggttttggggaaggcaactcgacggattcgagtgtaaaattatttgcgactgctataggataacctagttcgatatttagagccacgttcgactatgttaaacggtatatgaatacataaatatatggatatgcttacagattaaagatacttacctatagagttatagagcgtacgttttgtatccacctatttattggaaatttatgtttatgttttcaaaagaaaaacccctcttccaatgttttgttaagtgatgtgtttactgtgtgtttgctgttttcgttgtatgccaacgcttgaatacaatgatttcttcaatgccatattaatcttaactcgagagcaagtaaacaattaagcagctaaagtaaagtacgcaaaacaattgcgcaagtatttccataaataccagt

SEQ ID NO: 42485 - DNA, 1931 bp, DROSOPHILA
gaattcgccagcttcgagcgaaaaaagtaacagaaacagaaaagctgcaaatacaagctgctcgccaaaagttcgctagagaaaacttgagaaagcaaaatatgtgcaatgtcaaaatttgttttcgatagtatgctgccaaagtatccacagttccagccgtttatcagttcgcaccacttaaccaccacccccccgaattcgtcatctgcagcagttgccgccgccctagccgccgccgccgcctctgcatccgccagcgtttcagccagcagcagcagcaacaacaacagcagcaacacgatcgctggaagcaacacaagcaacaccaacaatagcagcagcagtccaagcagcagcagcaacaacaacagtaatctcaatttgagcggaggatccctatcgccgagccatttgagccaacatctgggccaatcgccccactcacccgtctcctcatcgtcgcccttccagcagcaccacccacaggtgcagcagcaacacctgaaccaccagcagcagcaacatctgcaccaccagcagcagcaacaccaccaccaatactcctcgctctcggccgctcttcagctacagcagcaacaacaccacattagcaaactagccgccgccgcagttgcctcgcacggacacgcccaccagcaactgttgctaacgcccccgtcagcgggcaattctcaagcgggcgacagcagctgctccccatcgccctcggcatccggtagctcctcgctacaccgcagcctcaacgacaactctcccgggtccgcatccgcgtccgcctccgcatccgcggccagttccgtcgctgctgctgcagccgccgccgccgctgcggctagctcctcgtttgccatccccaccagcaagatgtatccgtacgtgtctaaccaccctagcagccatggagggctctccggaatggccggcttcaccggactggaggataagtcgtgcagcaggtacacggacactgtcatgaacagctaccagtcgatgagcgtacctgcctcggcatctgcacagttcgctcagttctatcaacatgccacagccgccgcatccgcggtatccgcggccagtgccggcgcgatcggcgtggactcgctgggaaatgcctgcacacagcccgcctccggcgtgatgccaggggcagggggagcgggcggagccggtatcgccgatctgcccaggtatccctggatgacgcttacagactggatgggaagccccttcgagcgtgtcgtttgtggcgatttcaacggtcccaacggctgtccacgaaggcgcggtcgccagacctacactcgcttccagaccctcgaactggagaaggagtttcacttcaaccactacttaactcggcgaaggcgcatcgagatcgcacatgccctctgcctgaccgagcgacagatcaagatctggtttcagaaccgtcgcatgaagctgaagaaggagttacgagccgtcaaggaaataaatgaacaggcgcgacgcgatcgagaggagcaggagaaaatgaaggcccaggagacgatgaaatccgcccagcagaacaagcaagtgcaacagcagcagcaacagcaacagcagcagcaacagcagcagcagcaacagcaccaacagcagcaacaacagccgcaggaccaccactcgatcatcgcacacaatccaggccacttgcaccactcggtggtaggtcaaaacgatctcaagctcggccttggcatgggcgtgggcgtcggagtgggcggcatcgggccgggcatcggtggcggcttgggcggcaatctgggcatgatgagcgccctggacaagagcaatcacgacctgctaaaggcggtcagcaaagtcaactcctaagctgacaaccacccatcgcccagccgagccaacgagccaatcttccacca

SEQ ID NO: 42486 - protein, 330 aa, DROSOPHILA; identical to SEQ ID NO: 42453

SEQ ID NO: 42487 - DNA, 3846 bp, DROSOPHILA
cgcagcaagagggtagggataaattgatttcatttgtactattagtgctagagccctaattaattttactatgtattataggttggctaatccatcatcacttgctgctggtggacgaataccgtttagattggaaggtgtaggagaatggtgactttgattgctagattttgaccttagttgcttgctttgacctgaagaattaatttcattagacttcattatcattctcacatatctcacatggctaccatagagcgaaaacattgatattaactaagtgctattgatatttacctagatttagctttgtgaatctcgttcgcacttgaacatcttccaactaactctgccttagcacaaagtaatgtttgtaaccgatatttgataagctaatttcgccctgcttttacccatgaatttatcggaagacattgtttcaattattagctgctactaggactaaaggagacacaaaagaaaatcaagaaactattttgtaaggacttattgtaagtatgcacttcgatatttcgagagcatacaatacatttttagatattagtcatgaagaatctcacaacgaactacggaaaacccgtttcaattgcattctgagcaaaaagtgtacaaagttttaagctttttttaatgctaaatgtgcaatagtaagttaaatattagcttcgagtatatacggaataagttggcgtccatttttgcttaactaaaatgcttttcaatgaatgcaatatatgaattgtgtgcataccgtctcaccacgcaaatgattttaacgaaacaaataaaagtaaacaattttaaggacaaaaatatttatatcacattttttaacaataaacattttaaaaattatacattcgttttcaacattttaaattttttgagagcggtataaaccattgccattcgcaacggctcgatgtattttatttatgactgtgaatgttattttagaaagaagaagacaacacgtgcgtgcattcaacgtgtgtattctcagttgatattcgtttccctgcgatttcagcttgattaaggaattgtctaactatttaaagttaaataggcatggagagtgagcagccagcggctgtaaaggcttcagctccaattgaagagccacaatccaccgaaacagctgttgaattggggaaacatagcaccttgaaggcagacttatcaatagataagttggaaacagcgacaacaggtaagcttataagctttctatactataagttcaataatagatttggaatttcaatgcagaagctacgaatgccgtagtagaaccagtagaaatggagcagcaggtggaaaatgaactggtaaatgagtcaacacaagccatgacatcgaccacaacccaggaaaaggtggtgggttcagtgaataatcttgtagaggagcaacagtgtgtggaaatggaattcgaaacatcatcagatctcgtggtccagggaagtccatcggaagaatccaaaaaagttgcctctgacgcttctgctactgtgaccgcacctcaagttcagcccgctccacatgttgattcaagccctcaagcaagtggcctcagtctgttggctgcctacagctctgatgactcggatgatgagaaagtcactccagtgcagaacggcgacaacgatgtgattgaagttccagttacggaccccgcatcctccaccaccgcatatcgtccagttgtagctgtgagctcggatgacgagagctcaaagagcagcagcagcagcagtgactcagactccgattccgaaggagaatacctcaccgtacttcggaagaagattgacaaaagaatcaacaccgtggattgtgacgaggatgacgaggactttgatgaagatggggctacaggagatcggtctcgtcgtcgccagcccccgaaagtacgaggagaaatgctccttgatgaccttccgcctattcatcagctagagattactgtacccgaggatgaatgcgttgaacttggcaaagttcagtccatcgtggatcagcttgttttggtttccgtgctgccgaattccatgctattcgatctcgacaccgttttgttcctggagaagggtcgcaaggtcctgggcgaagtgttcgatgtgttgggtcaagtgtcggatccactgtactgcgttcgattcaacagtaacaaacagatcctcgataggggcatcaaaattggcgacgtagtgtactgcgctcccaaaaccgaacacactcaatttgtgatcctctccaagctgatgcaagttcgaggatcggatgcttcgtgggagcacgatgtagaaccaccagcccgctacgtagatcactcggatgatgaagaagaaagagaagccagggcagagcagcgaaagcgccgccaaagggatcgcacaaactccacagattccgtggacacggtaacctcggtggccacgacagccactaaggcttcttcagttgctcctcctcctcgtcaacgcggacgtcgtgggcaacgagagagtttccgccagagccagcgaccctccattaaccagcacaaccagaatcagccacaggacgaacaatacaacttccatccaagctacaatccgggcagctggcactccaactactaccagaactatcaccaggcagcggctaactttaacatggctcagcagcatcctggcatgcccttcccagtgcctaactatggctacggaatgccctacgccatgccgcccatgtacccacacatgtacccgccaccaccaccctttgctcctcctccgccgaacaaccagtcacatcagggtcagccgccacccagctagagataggtatgacaattcagtgaattacttttattattccaataaaaaatctttatcaatttgcgtgtgtgttgttaaaaatgtgtcctgggttgttcgataaaatgcatgaaaggttcgttggatttgtataaaaaggtacttaatctgtgtgggatcattaaatacggttacgggtgtaaatatatacgcgtttaactacgatatatgtgtacctggctacatggcttggcttattatcgtacagcaggaagcactaagcggccgaaaacaacttcaatgtgtataaatatgcttgctggctaatctaaaatatatgtaaacatatttatgtgcgtaattgtgcactttttctatatactattgggctaacaacagttgccttaacttgttaaaatttcgttcaactgctgagcaaccacaaaatattttgattgagcttattcgagcaaccaaacaagtggaccgggatggggtcatccatattcaggaccacgtaggcacgtgagaatgtgacaataaaggtaggagcactccgaacagctccaagctatttacattacaacaataacgtaaagtaaacgaaacaacaatgggccggtttgggttaattctcgttgattaatttgcaaatgtaggttcggaaagtaatctttgggcatattattagtttttaattaggcaaggacttgggttctatcatcttgtaataccttattttcgttgtatcacattaaacgattgcgtacgttcaataatcttttagaaaatggattatattacttatattcccacaatatgcatgccaatatcaagtgtatattgcgttcttgaattgtttaaaaatatttggcacatttttctctttcgaatacgtaaaatttgatatgacttttcgtgttatcccaccacacaaagggcgttgattcaagattacttttcgcttctacgacttttaagttgctttgaatttgtacaaaattaacccatcccaaggcgg

SEQ ID NO: 42488 - DNA, 1787 bp, DROSOPHILA
tgcattcaacgtgtgtattctcagttgatattcgtttccctgcgatttcagcttgattaaggaattgtctaactatttaaagttaaataggcatggagagtgagcagccagcggctgtaaaggcttcagctccaattgaagagccacaatccaccgaaacagctgttgaattggggaaacatagcaccttgaaggcagacttatcaatagataagttggaaacagcgacaacagaagctacgaatgccgtagtagaaccagtagaaatggagcagcaggtggaaaatgaactggtaaatgagtcaacacaagccatgacatcgaccacaacccaggaaaaggtggtgggttcagtgaataatcttgtagaggagcaacagtgtgtggaaatggaattcgaaacatcatcagatctcgtggtccagggaagtccatcggaagaatccaaaaaagttgcctctgacgcttctgctactgtgaccgcacctcaagttcagcccgctccacatgttgattcaagccctcaagcaagtggcctcagtctgttggctgcctacagctctgatgactcggatgatgagaaagtcactccagtgcagaacggcgacaacgatgtgattgaagttccagttacggaccccgcatcctccaccaccgcatatcgtccagttgtagctgtgagctcggatgacgagagctcaaagagcagcagcagcagcagtgactcagactccgattccgaaggagaatacctcaccgtacttcggaagaagattgacaaaagaatcaacaccgtggattgtgacgaggatgacgaggactttgatgaagatggggctacaggagatcggtctcgtcgtcgccagcccccgaaagtacgaggagaaatgctccttgatgaccttccgcctattcatcagctagagattactgtacccgaggatgaatgcgttgaacttggcaaagttcagtccatcgtggatcagcttgttttggtttccgtgctgccgaattccatgctattcgatctcgacaccgttttgttcctggagaagggtcgcaaggtcctgggcgaagtgttcgatgtgttgggtcaagtgtcggatccactgtactgcgttcgattcaacagtaacaaacagatcctcgataggggcatcaaaattggcgacgtagtgtactgcgctcccaaaaccgaacacactcaatttgtgatcctctccaagctgatgcaagttcgaggatcggatgcttcgtgggagcacgatgtagaaccaccagcccgctacgtagatcactcggatgatgaagaagaaagagaagccagggcagagcagcgaaagcgccgccaaagggatcgcacaaactccacagattccgtggacacggtaacctcggtggccacgacagccactaaggcttcttcagttgctcctcctcctcgtcaacgcggacgtcgtgggcaacgagagagtttccgccagagccagcgaccctccattaaccagcacaaccagaatcagccacaggacgaacaatacaacttccatccaagctacaatccgggcagctggcactccaactactaccagaactatcaccaggcagcggctaactttaacatggctcagcagcatcctggcatgcccttcccagtgcctaactatggctacggaatgccctacgccatgccgcccatgtacccacacatgtacccgccaccaccaccctttgctcctcctccgccgaacaaccagtcacatcagggtcagccgccacccagctag

SEQ ID NO: 42489 - protein, 506 aa, DROSOPHILA
MEQQVENELVNESTQAMTSTTTQEKVVGSVNNLVEEQQCVEMEFETSSDLVVQGSPSEESKKVASDASATVTAPQVQPAPHVDSSPQASGLSLLAAYSSDDSDDEKVTPVQNGDNDVIEVPVTDPASSTTAYRPVVAVSSDDESSKSSSSSSDSDSDSEGEYLTVLRKKIDKRINTVDCDEDDEDFDEDGATGDRSRRRQPPKVRGEMLLDDLPPIHQLEITVPEDECVELGKVQSIVDQLVLVSVLPNSMLFDLDTVLFLEKGRKVLGEVFDVLGQVSDPLYCVRFNSNKQILDRGIKIGDVVYCAPKTEHTQFVILSKLMQVRGSDASWEHDVEPPARYVDHSDDEEEREARAEQRKRRQRDRTNSTDSVDTVTSVATTATKASSVAPPPRQRGRRGQRESFRQSQRPSINQHNQNQPQDEQYNFHPSYNPGSWHSNYYQNYHQAAANFNMAQQHPGMPFPVPNYGYGMPYAMPPMYPHMYPPPPPFAPPPPNNQSHQGQPPPS

SEQ ID NO: 42490 - DNA, 3492 bp, DROSOPHILA
tggtatacggccatgcgaaaccgttgcaatatgaggcaggggaacacgaatggcatgaccttctgccaggtactttttgttccagaaacgggtccgtttattgaaactgaatcggacttggacgtggtaagccaagaaacctccgctaactagtctgccaacgtttttaaaaatcaacatattcataatttactaggtctgtagtgactcctttaagggcttcaacgattcctttgttctgggctttgtctatgtagtgctgtacaacatatcctgggcatcgctattctgcgtgcacaagaaggtgatgttcgtattctccctagtggcctcctcgacatttggatttctgcttatctttgccaccaaccacatgttgcagctcttttcgctcgtgttcctgatcgcttttcccggcatcataattgggctgctcggtggttccctattggtattcgtgcccacctacctgcgcggcaaagccctctgtatcagcctgatgtggtgccgatgcggagcggcgtttggggccatgttggtgggctccaagatccagtacaactgcgaactcttcctgttggcgatctccatactacccttgagtaagatgcgatgccaatgatccttgaatataagttatgccatttctaattgctttacctacagttgccgcttgtatggaggggtacttgccattgtgacttcagggaatatgtaataagtaataagtaattgctctctttagccatgttatccaaattaaagcgcggcccaaaagtaggcaagtatgtcatgtctttgggttttcattaaagcgacttgtagtatactcaaggtagcaagctgtatatttcattttttatattgctgaagtgaaaaccataatttgatctttgcaccatttatttaagtattaacatcgattattggggtaattcatttattcaaccgacatcaagactagagtaaatacttatttctgtagctgcaactacttgttctttcccagcacgttaaactattgccccgaaaaacaatttaaataaaaatgcgtatgctaataactatcatcatgagttagtgacgttgccatggtcgtctaaaatggatttagaatatctcctcctcattaaaaccgcgagcctgtaacataaatctataattttccgcccaaaagtcagttattctatgcttacaaattctcctccattgttggcattttttcctagatttatgttgtccatctcgtgattcctcaggatatccatcagcgatccgcgctttccgaaccgaacgcgggctctgtcgccgtagtaggtgtccagatcctgcaggaacttgtaggcatcagccatagtgttgacatcgttctttcgcggaggtctggagttggacgcctccactcggcagccggcggctaggagggcaagggccacacaggcaaccaggatgcaacgcattgtttggcacatagttctataaatggctaatgtatgtttatgtaggatgttttgtgtatcattatagagctatataatatcttaactcagttaagcttaatttaattatcactgttcttttagtaatttgtcatgagaatccgaaaggcatgctaacatttcgatacttcgcaaagttagggaaggtcgcaaaaaattagcaatagctaataaaagcgaacacaataaacttcggttattttctgtgagtctttttgatttataattttaccaaatacgtacacacatattaccgatggtaatttataatagttttttgtttacagaatcgataaaaatgaatagttaagtaaaacacgtgagcgtaacaatgtttgtttataattagatggtgtttttccatttacaataatcgatgacagggtaaaaaaaaaccttagaattaactaccaatattaagtaatttagatctcgtatcgctcggggacctatttaggggtctggatctttggagggcctcacttaatagcgggcaatctagtatgctaattgactaaaactaggctataactcggttaagtgatcgtacaagcttactgccgtcacttatggtccctcaatgatttttgggcgggactgacgcaagctgctcatacttcggcccggaaaataagcaaataaagccgataattacgagaattacgcgaattataaggcacttagcctctagttaaacccgacttgcgcccaccgaaaggatgtggctatgaatcacagttttagggcctattcgtactaaagagctcataaaatagttctaagaaagcgcttttatttgccatacctgctctaaatgacagctcattgtttgactatattatttgatatatctatctaccataagtgtctaagtgatttacggggcagcgggcctgggtgttgttccgttagaaaacccttacctggttcaactgggagtttgagtattggaaagcgcaacggtgtcacaatgcaattgttcgtcggactgtatgactgtgtaatcagcggacgcgaccgtgaataaatgttggccgaaagccattggcaacaggtatttataggagtccccggctggaggatgtgcccggcttatcatcgccgaccagcccactctccaacctcatccagatcccgagcagaagcgaacggaagttggccaaacgattcgaaacgaaacgaacaccgtgcgaaacctctaaaatgttttcatatgcaggctaattatgtggctgctgtcgcgttcaaactttcgcagcagctggaacggaagagccaccgggagtgggagtggcaagcgaagtgggtgggcggtatggaaatgggagcgttgaatggagaatggaaaatggtgaacggagaacagagaacggagattggcgggcgctaacaaatagtgacagttggctaacgagatatctgaaaacggggctatcaggagcagaattacgcataactgaataaatgacaaattttcgataagcaggattatagtgcctgccactaccccacctgaattcgttctcgtttgggttctctgatttacgtgctcacagcctgggtcgactagctgactagctgcctagctgcaatcctccttccgccttcgctggcgtcagcgagctgcggctctgtgtcattaattatagtattttgattattgtttaataactgttggcttagacggcgacgctgattgcgatacgatacgatacgcgacccacccgtcccgatgaggtattaagtgcgctgctcgacttcccattgctatttaatttggggtcaggcggttaagtcatttcaatagagattcaatcggacaatcactgctgtaatctgcttgccagtggctacggtgcgtatacgtaatatgctttcgcttgtggtatcacaacaacgtgacatcatgaagcgggttctctggctcttctggatggttattaacttaatatttgttataagcgttctgactaattaacgctctagccattac

SEQ ID NO: 42491 - DNA, 493 bp, DROSOPHILA
tacagtccgacgaacaattgcattgtgacaccgttgcgctttccaatactcaaactcccagttgaaccagaactatgtgccaaacaatgcgttgcatcctggttgcctgtgtggcccttgccctcctagccgccggctgccgagtggaggcgtccaactccagacctccgcgaaagaacgatgtcaacactatggctgatgcctacaagttcctgcaggatctggacacctactacggcgacagagcccgcgttcggttcggaaagcgcggatcgctgatggatatcctgaggaatcacgagatggacaacataaatctaggaaaaaatgccaacaatggaggagaatttgctcgcggttttaatgaggaggagatattctaaatccattttagacgaccatggcaacgtcactaactcatgatgatagttattagcatacgcatttttatttaaattgtttttcggggcaatagtttaacgtgctgggaaag

SEQ ID NO: 42492 - protein, 102 aa, DROSOPHILA
MCQTMRCILVACVALALLAAGCRVEASNSRPPRKNDVNTMADAYKFLQDLDTYYGDRARVRFGKRGSLMDILRNHEMDNINLGKNANNGGEFARGFNEEEIF

SEQ ID NO: 42493 - DNA, 2868 bp, DROSOPHILA
tttccggcgccgcctcatcagcgaagtccttgaggcgatccacctccgagttgtcggtgagttttaggatgtacttctcaaactcactggccacgaacttctgcagcttgagaagatcgtactgcggcggaccctccacggtgacttcacactccttggcaaagcacagatcctgctccagctgctgtgtgcttcgatggagtagcttaatccggaactgcgccggacatcctcgagtctccagttgtttccaaatagctgagaccaattcggcatgacgctcctcgccggacactttgtatgtctcattggccgtacgagttacacaactccggctgaccacctcctcgcttacggctgctgccttctccgccgtgctgaccagaaatcgcttgaattccatcaggtgcgcacattccgatgcgggaatcgcatctgacgacatacttgtcgtgggtcgcgtgtgcctcagttcctgtttccgctcctagtgacgccgcgcgatcatgagcttatcaatgctaattgttgctcaacgatgattcacgcgcgcactgtgcattttatgatttttttttatgttgttattgtttgcgttcttctatgttattctgctgcgaactgaactgtactggctcgataactttgctatgcctatcgaaatagatgcgtgatattcccacctacgaagattgtttacccttcatcttcggtttcatctattacgcttcatttctctttttatttattttttaattttgattgaaaacctttaactgcatttggaaacataaaaaaaacttcagaagtattttaaatgaaataatagaatatatttataaacataattttaatcaagcctttacaataaataacaaaaacacctatttagcctttttaaggcttcgcatgcggacccagtggagacaagctataactgatttgagatagaacggccacacatccaccggtggccagctgattgttactgttgcttttgtttttgttacaaattttgatttttgtcttgtttaacaaaaaatgataaaatcttgaacagtaaagataatccacacaatttactatgagcacgccactggaacagcagacggaagaacgggaggcgttgcagtcaatatacgagggcgacacgaacttcaaggaaatagatagcgtcacatttcagtacaaagtaagccacatggataaaaaaaagcacacaaatatgataatttgtaatataataaatgaaattttagtatggcgaagaggataactacaagtcgttcttggtcgagctcaagtggggcgaaaattaccccgatgaggcgccagcgatcaacatgaacgcgttttacaataggaatctgtaagtggatcgttattccttgggaaattggagcaggtttagctctaaagactacgctttcctatttaacagactgccagctgtcaaggaagggatccaaacggctctgagtacggaagcggaccaatggctgggctgtggcatgacctataccctgttcgaatgccttaaggacaacctggagcaattgaccgcagagcaacccgaatctgcacccacggtggcgttagtggatgatggcgtgggtgctctaaagatctccgatcccaatgccgatgcggagtccaagaaaaaggagcccaagaaggagcacctgactaaggcgcaaaagcgccggcagtgggagagaaccgatcacaaaggagaccgggaacgtggctgggattgggtggacctcgtcaagcatttatcgcagacgggtgggaaaaacgatgattctctcactgccgccgaaattgcagcgtccaacgctccagctctccaccccctgaacaactaaaatgcctaccaactaaaaataggagtaataacatcgaggaaaccttaaattgaaatcaaaagccaatactattttatgtgatagaataaacgcgagtaactgcatgggcggctatcataaagtctatatcttgtttacgctactaactatcaaaggtttcaacttttgatttgggtgagaggattggcccttataagataacattatctttagaggagcaacacagcgaaattcctgggaaaactttattgacatttgtaatatttgcgttacatgatggctgcataaaatcatagtttaatacaaaagtaaaaatcaaaatcgattacaataccgggatttgctttgcaaggatcaacattgacaaggataactagcgataaaaacgatcattccaactgtgtcaaactggtcagtctaattaaagacgccttcggcccggacatttaaggcatccagcaaggagcccatgggcgtggagggagcaaagctctcgatgctgttggtcagcttgttcttgatgtttcgcagtcgcaaggaggcgtggatgaaggtcagcgaaataggtagcaacacggtgaaaatcgtcaaaagcactgcgctcagcagatgcagaagaagataacctccgagcagagctccagccagtatgtaccatttctgttgggcattctgctctgctgcattggcatttccaccagtcagacgactggcgatgaagttcttcttcgactttccgctgaagaactgccagataacgcctatgatcaaagcctgcaccagcagaccagtaataatctttgaaggattgaagaaaatcatcaaaacgtagatggtaatgaagagcaaaaagtagtttgtttggtaatagagcaggttcttcaccacccgattgccccacttctcaaaatccttgagattgggcagttggaatcgggccgatcccaggatgaagtcatcgagggttcgcagaggcggcaactgaagattgccggacaag

SEQ ID NO: 42494 - DNA, 729 bp, DROSOPHILA
tttttgttacaaattttgatttttgtcttgtttaacaaaaaatgataaaatcttgaacagtaaagataatccacacaatttactatgagcacgccactggaacagcagacggaagaacgggaggcgttgcagtcaatatacgagggcgacacgaacttcaaggaaatagatagcgtcacatttcagtacaaatatggcgaagaggataactacaagtcgttcttggtcgagctcaagtggggcgaaaattaccccgatgaggcgccagcgatcaacatgaacgcgttttacaataggaatctactgccagctgtcaaggaagggatccaaacggctctgagtacggaagcggaccaatggctgggctgtggcatgacctataccctgttcgaatgccttaaggacaacctggagcaattgaccgcagagcaacccgaatctgcacccacggtggcgttagtggatgatggcgtgggtgctctaaagatctccgatcccaatgccgatgcggagtccaagaaaaaggagcccaagaaggagcacctgactaaggcgcaaaagcgccggcagtgggagagaaccgatcacaaaggagaccgggaacgtggctgggattgggtggacctcgtcaagcatttatcgcagacgggtgggaaaaacgatgattctctcactgccgccgaaattgcagcgtccaacgctccagctctccaccccctgaacaactaa

SEQ ID NO: 42495 - protein, 214 aa, DROSOPHILA
MSTPLEQQTEEREALQSIYEGDTNFKEIDSVTFQYKYGEEDNYKSFLVELKWGENYPDEAPAINMNAFYNRNLLPAVKEGIQTALSTEADQWLGCGMTYTLFECLKDNLEQLTAEQPESAPTVALVDDGVGALKISDPNADAESKKKEPKKEHLTKAQKRRQWERTDHKGDRERGWDWVDLVKHLSQTGGKNDDSLTAAEIAASNAPALHPLNN

SEQ ID NO: 42496 - DNA, 9716 bp, DROSOPHILA
aaccccaaacaatgacgggcaataaagctaacaaaatggcaattctcagacaaatgtctggcgggctgagcacgtgaaaaggctatttttcaagagggtcagagagaatgctgtggggcaaaataggtcacgttataatatgaaaatcggaaaactcgattgtccggctaactgttcttagtcagcgcgatcggatcaatcgcatgggcatgccaccgatctgtcataaatatcgaactaaatagcgaacggacggacaattatcagaacagccagttaatagctaatcgttattggctgctaagaatcagaactggatgtaattgcgtcaagaaatggcttttaattgcgactaaacttcatgcatatttatggccggcagcgaaaagggcacgagcacgtgtgcgtgtctggtgtgcccaagatagagaccacaccgccggattaaatagagtcatttgagctattaaatttatgagatgacaattgcggctaagcgttccctgtagacaatggctaacccatctcaacctgcgccgatccccctgatgatcgttctaaccccaggggggtttttcgagggttgagtgttgggcgttggatgttggattcatagggttggggttcatagccccgaaccaaaaaaaaaagtgacttaacgctgctcaatgttttcgttttggccaacgagcgtgcgaatgtgcggcgctttagccgagcccgaagcccgagcagaggcttgaatatggaccggttgtagaaaggttgagatgctagtgctagccaactgctagctgctagctgctaactgctaactgctagctgctagccgatccgatctccggcagacactcggaactcgatcggtcgagagatcggggaacggcccaagagtccatataaaggtccccgctgcagtcgagatcgccgcattaagttgtcaaaatttgtgagaataggaagtgcgtgacagttcagtacgattcgagacaaagcagcgagactccagcccagccatcagatccagctcagagatatagccacaatcagaagcagaatcagaatcagtatcagaatctggcaatagtatcagctaacgcccagatcggatcacgtcggagcgggactctcgggtggacaatcgacaggaatcaagcactcgacctattcatttatatggaaacccatatcaaaacaaattaaactactgcggttaccatgcaaatttatcccatcgtaatcggaatttcaatcactatcacaatccgtaccgcgaccgacctgttaatagtttaatttgctgtcataaataacagcacaggaattaattgattttcgtcataaatcaataaataactaaccaaccaactagccagccgttcaatcaagtgcaacccgttgaaaggagggggatacaaaatcaaaatcagatcgcgccggagctaaaattttttaggtgctgaaatgaaactgtttaccaacaaaaaccagcgcaatgcaagtgagtatgaagtatgcccagtccgaaatggccaaaagcgaccagtgcgcttaattaagccatgtggagaccattgtccgcattggtcaaagccaaaggcccataaaagttaattcgaaccgccgttttgccgccaagggagctgctgcccccacgcgatcgtaaaaatgtcaacaaagatctcttgcacaaactgagccgacgaagtcgaccaaaaagtcggcttaaattgctgaaatgtagtaggaatggtgcaatggattttaaaacactcgtgcatgctaatcaaagcaatataaaatggtgtcgaaacttcccattcgcgttcctggcgaaaattagaatgctaattaccgaattactgacagctggcggcacgcgtaaataattcgttttaatttattgcaaatatctgggataggataccagttctaaagtccgtagatatttggcggcacgacagctgtgagctaaaattagcagcgaaataaaaacgatacgggctgagaagagagtttaacttaagattgtattaattaatgctttctagggttattcgctttatttgttttttttttttcttttctcagcacatctgggctgtcggccaaagcattttttcaaagaccaaataaaaggggcaagacatcggatcggccgatttgcataacgacaaatgagaaaccaagggcgtagggttctatacattgtaggtcagttgtgtagggtcactcgagattaattgtaagcagcttgtagcttatatgtgtacatagtacaatgtggagctccacatatccagtaccgccgtatctccagttttggcaaagtcatccgctagctaaatcttcggaagcgtatatacgtgtgtgtgtatattaacggatctgagcggtagtgcaattaagtttgcataaattaagatttgaaatgaaatcggttgtgactgaaaatgtcacgtattaccttaccatgaagttcgatgatttcaatcagcatatacatatgcgctgggaaaactgaaggtgaacgcgatgattgcccagcccgggtcagattggccccacgataaatgtaggcgatattgctcgacaagatgctgacagattcccctggcttcgaatctcaagccgaatcggagtcgctggcatgacttgcagagatcaccgagaacacttcgatccaagccaactaatttgccgcagtgcgccataaatcaatacgatatacagctcaatgcccgctaaacaatgcaaatagcagccattgtccgggcattagcaataacaatatcacatcgctcgtgtaaagtatccgttcgcaggctaaacaaatcggatcagcatcgttatgagcattagaatgagaatgagaatgagcatcagcatcacataggcgtcatatgcgcatcacctgcgaatcggggaagttgtaaacctggcgaactacatatttacttttccttattggcgggcatctaattgccgcgagactttgactgcgactatttaagggttttgggttttttggttttggcgatgattaaaagcaaatagcgacagatctgggattaatcactagccaaacacaggcaaacacaaacatcgtcataacagctattcgactattcagctagtcgatcgccacatgctgctaagcagaaacatcacggcgcggctggagagtatctgtatctctatttgtatcttgtggaaacccgagtgcgaatctcggcatcgagctacagagctatagctatagtttacggctatagcatacggctatttgcctaatttattgtcgtttgacggaagtcgcacacacacagatacacacacctgtcaaccggcgaaggtgtttcgtcagaaacaaaacaaattcattcttgacttcagtgggtcagcactgctgctccgatgtgacgcttttactggtcaaaaaaaaattatatatatatgtatgtatatatgtatatgtgtgtgtgtgtattttatataattttttccagcaccgcatcgtgcacttgggttcattttcaggtttttaatgctggccggcgaattgcaccgaacttgaacttcagaccgctgcagaggcagtagaggtggcagtcgccagccgccaagcgcatacttactaactgatatatccgatcccgcctgatactgatattgagccgattgctgttgctgtttggctgctttgctgtttttctgtcgcaaacaagttcacagctcactgaatcagctgctgcgatcgagacaagcacaagcgtctttcattcatgatgccgtccgtgtcttgtgtgttttggcccgccaatctttctatcgtcatcgacgatttggcagcggactttgccttttgcctcgccggtgcaattgttgcgcaatgcaagctccactttattttaatcatttcatttttttttttgccagccagccagccagttagccagctatccagctagccagccagcttgtggagattttcgtgtcgtttggccactttgcgtgtccattttggcattggtcattccattgcagcagaataattttggagcgctttgtgtgcggcctaatttatgggtgggccctaagttcgggaatttcggctgtcacattcaaggcaaggatatgcataagtatctaaacgcacactgcgagaaaatataggccacataattgatttttgagtgggaacggaaagatcgcaagacccatatatacctgacaacctggctttaaaaaaaaatcgttacatttaacaacacaaaacctcatcacttttaaagaacatattctgtcaatatttgtacacacaatatttaaaacgagttctgggaattaacacgacaaaaggagtggagaaaaggttcatagtttcagatagtatacattgttcttactgtcatataagcacaagatataaaaacttgatgtatttatgaaccttttccatgaagaacacgtcattgtttttggcccaaaaataatattttgtattatattaattgaaatgtagttttttcctgtgcacatgcgtatttcctatgaatgggaaatatgtttggatttctggtttcatcggagccatgcataatttgtcatgtatcattgcggtttgttttgattgtgaagtcttgaacttatttatgacaccaaagttgacaccaaagcgaaattgttaatgagtttatgctgtttgcttttcgatctcagccgcggatcgcagacgctgtgggatcgtgccattttggagcgagttaggggcgtgctagccagttcattgatcttggcaggtgcgcctatctatctacctatctatctatgtatctatcggtcgctgctttcggtttctactacttctacttccatagaaacagttggggacttttctacttttgtttttgttgcgagaactcgctaaacgatttgtaccgattaatgggctacgatagtgagtttgatttatgaccgcctacaatacccaatgtgattcttcatggagcggccatgatctctggaaatcggtcacaggagaattgggtgcggccacgcgcactgggttagctgatttcctttcaatttccggccattttttcgagtgcggaagtgaatttcaccggggcaaagacaataatcttagcgcaaggtgagaacaaacgtgtttcggtcgtaaaatgagtgatttcacttgaagtgaatatgaggagaattgcagcctagattgatatgcttcgattgccttgcccatcttccgtacttttaatcaatattccaaacaaggtcagtggaactggatttcatcgacttttctaggagcggccttcttatccaattggtgtaaacaaaacacaaaatcagtcgcaatttacttttcagcctagtaaattccgttgccttaaaaacgattaaaagcaagccagtgacagtgggaaataagctatttaaggtgtaaccataaattaaacaaatattttttgtttacccttatgccaaaaagtcggtggctgtgcaaaaaaaaaaacctgttggtagctgtaggtgtttgctaatgccgtctataaacgaataatatgaccattaaatttagacaatatattaaaattgccggaaaaaatgtcccagagcaagggcacttaactagaattattggcatttttggtgtgttataattcgatttctttttttgagagcatgtatcgccttccgacgcatttgtgattataaaatcgaagaacgttcattgaaccgccaattctccgaattcgggcatcgtcatcgtctgccggctgtcgtctgccggttgtcatcgttttgtttattaaaatttttggcctggagccgctgttcctgctcctgccattgaggcaggtcgcggatctcggccgaccctatccgcttcgatctgccaccaaggtcaatggcacgatggacacgatgatggggggcgcacgctatcgacaaactggaaccgcaccaaaaaccagttcaacttcagctgacatgaccataactcatccgctgatctattttattgcagagctgttgcgcagcgccgccctcgggatgaccctgctgttcttcggttccctggtgataatctcggatcctcttcagagcatcctggacacggtaagaacaatgccttttggaactgttgaaatagtaaagttctgctggggtatatgagtaaaatcggtttgttattgtcgtgtcaattagtgactttaatcacttaattgtaagcgttgtgccaataaaatgaaacttgtattctgactaccccgatatgaatactagtagatatcatttaaataaaactacgatctacaagcgtctataaatacattcaagatatccggtataatcgttgatcttttgattcataaggaaaatatcttttaatttggatttctttattgtagtattttttccgaaatagaattttttactcttttaaattttccattgcaaactgctttaaaatgcaaaagtaacatatggctttgtgtcttatgaatagaaaatggtgttcattgacgaatccaatttattgtccaaattcaagttcgaaaactaaacaataggtctttctgtaggccaaacattggcattcaatggaaattcaatactgccacggttctctaggagaagtaatattgaacaacattttaaagtatctagaataaatatttgttttcttttatctttcagcaattgagcttgaaacccggcaccctgctccatcgactttggcttctgccaccgttggacgtctacatcaatgtatacatgtttaactacaccaatgtggatgagttcacgtcgggcagagcatccaagttgcagctccaggaggtgggtccttatgtctacaaggaggtcttgagcaaccacaatgtcacctacaatgagtccaacaataccatcacgtattcaccgaaacgcgagtatgtctttgcaccagaaagatctgtgggtgatcccaagatcgatcgcatccgggcgcccaacatcccactgatgggagtgaccactctggcatcaagtctatcgatgttcgccgccctgggtctgagtgccattaccaggcagctgaactcgcagcccatgctggaaatgagcgttcacgactacatgtggggctatgaggatcacctggtagagctggcctctcggttcgtgcccaattggattgacttctccagctttggcattatggagaaggtgaggtcttataataaatgtcttaaaagcattttaaactgatatctataaattcagctcttccgagagggaaatgagagcaatgtgttcaacatgaacttgccggaacccaaggacaagtatggaatgagaatgacggatgctccgcgtggttataccgtggatagcatcaatggtgaacgcggtttcaagggttggcagtacaatgaggagaccaagtaattactgcaagcctttccttttcagtgaatattctataactatatctttcttttagtggaaccatgtgcaatcgcatctggggcagtcatgatgccacgctctttccgctggacatggatgagaacgacgagttctttttgtacaggcgaaccttctgccgcaggttgccggtgaaattcaatcgcaccaccaccttcaatggcctcgatgcctttgagttcgtaatggagccggactccttcgacagcgaggtggacaatgccaactcttcgtgctactgcaagaacaatcgttgcctcaagaagggtgttggcaatgtgtcaccctgttactacagtgagtaccgatgaccttaatcaacattagactgtgtatttactagaccctctctcaattccagacattcctttagccattacgtatccgcatttcatgcatgccgatcccagtctgctggagccattcgatggactgcagccgaatgtgtcgcgcttcacctccaccttcgtggtgcaaccggtgagttgaatcgaaagtagtcccagtttgtcaattcaataatactttatgggtttcagcaactgggagctccgatgcagggcacccacctgcgattgcaggccaaccaggtggtggggaaggtgaacttcaatcggatgatgacgcccttcgagaacatgatcctgccgctgctgtgggtggatctgaacatcgatgtcctgtgcctgaccctgcgtctgctcattcatggcatcaagtggggcttcccgctgctgcagtggagcgctgccttgggaatgctgctggccggcgtttaccagctgtgcagcgccctgttgctttgcttttggccaacagccaggcagttccagaaggtggatcaagtggaacgcggcacggcggttcaggtgattggagttggactcggtttggccaccggacttcgaaaaccatcgattcatttggaccctgaggagcagcaccatctgctcctcggcggcggcagcttcattcccaagatggccaagacgtaacccagcggaggatcggaatgcatacctctaattaagatggggcaacactgtgatatttaggcttaagattcggtgtaaattattgtgctcatcggaaacaacttagggaacgtccttgcctacgtactagttaacgataactataagctagggcaacagttagagtggtaacaataagcaatatacagctgagcttgcactcgataaatacaggtcgatagctatgtaaacaacgtatccttgattcagtgggtggcgatcgtgtcctcaatccacttcatatagtacgaggtgcgggtgtagacgtctggaaagccttccagggcacagcccgatccgaaggaggtgactcccaccagaatccagggcccgtcgcggctcaagcggcactgcagcggtccgccggagtcgcccacgcaggtgccgccctccccgttcagcttgccggcgcacaggtgaccaccgtggatgttgacgaagctgccgtaggcatctctacacctgcaaaaaggtaatagtaaactattatccaatttaaagagtacacaggcttaagacgtcacttacctgccattctggtgcaatggcacctgtgttttcagcagctgattggagagatcaccactaatgttggccttgccccatcccgtggcaacgcagtccacaaaggcaatctcctttggctcatcactgacttttgggtgcttctgctcagcagaatcatccgaatcccggcgaggacccagcttcattagcttatcgttgcgtcttcgcgaacgcttgtggctgcgcggggagcgttgcgccagcgcttgacgcatcctgctgaggatcttcatgttcatcagttccttcatgctgggggccgtgacatttcgatagcgccgacgactctggacgctgcgcagaaagttatcgatcttttcgggcacatcttctagctccagctgctggattagcacatcctcatcggccgatgaaggtggagacactgtctctgactgggcctgatccggcgattcggctaggagaaagggcaaacagatccgccggatattggaggccctggtgagatccgctggctttgaaagcttcatcagcaccacgtcgtgcttgaagttgtggtagcgatggtgcatcacgatcttctcgacgggaatacgctgctcgttgcccgactccacatcgcgatcgtgctcgcctaaaaccaccgtccacagcggtgga

SEQ ID NO: 42497 - DNA, 2350 bp, DROSOPHILA
agactccagcccagccatcagatccagctcagagatatagccacaatcagaagcagaatcagaatcagtatcagaatctggcaatagtatcagctaacgcccagatcggatcacgtcggagcgggactctcgggtggacaatcgacaggaatcaagcactcgacctattcatttatatggaaacccatatcaaaacaaattaaactactgcggttaccatgcaaatttatcccatcgtaatcggaatttcaatcactatcacaatccgtaccgcgaccgacctgttaatagtttaatttgctgtcataaataacagcacaggaattaattgattttcgtcataaatcaataaataactaaccaaccaactagccagccgttcaatcaagtgcaacccgttgaaaggagggggatacaaaatcaaaatcagatcgcgccggagctaaaattttttaggtgctgaaatgaaactgtttaccaacaaaaaccagcgcaatgcaaagctgttgcgcagcgccgccctcgggatgaccctgctgttcttcggttccctggtgataatctcggatcctcttcagagcatcctggacacgcaattgagcttgaaacccggcaccctgctccatcgactttggcttctgccaccgttggacgtctacatcaatgtatacatgtttaactacaccaatgtggatgagttcacgtcgggcagagcatccaagttgcagctccaggaggtgggtccttatgtctacaaggaggtcttgagcaaccacaatgtcacctacaatgagtccaacaataccatcacgtattcaccgaaacgcgagtatgtctttgcaccagaaagatctgtgggtgatcccaagatcgatcgcatccgggcgcccaacatcccactgatgggagtgaccactctggcatcaagtctatcgatgttcgccgccctgggtctgagtgccattaccaggcagctgaactcgcagcccatgctggaaatgagcgttcacgactacatgtggggctatgaggatcacctggtagagctggcctctcggttcgtgcccaattggattgacttctccagctttggcattatggagaagctcttccgagagggaaatgagagcaatgtgttcaacatgaacttgccggaacccaaggacaagtatggaatgagaatgacggatgctccgcgtggttataccgtggatagcatcaatggtgaacgcggtttcaagggttggcagtacaatgaggagaccaatggaaccatgtgcaatcgcatctggggcagtcatgatgccacgctctttccgctggacatggatgagaacgacgagttctttttgtacaggcgaaccttctgccgcaggttgccggtgaaattcaatcgcaccaccaccttcaatggcctcgatgcctttgagttcgtaatggagccggactccttcgacagcgaggtggacaatgccaactcttcgtgctactgcaagaacaatcgttgcctcaagaagggtgttggcaatgtgtcaccctgttactacaacattcctttagccattacgtatccgcatttcatgcatgccgatcccagtctgctggagccattcgatggactgcagccgaatgtgtcgcgcttcacctccaccttcgtggtgcaaccgcaactgggagctccgatgcagggcacccacctgcgattgcaggccaaccaggtggtggggaaggtgaacttcaatcggatgatgacgcccttcgagaacatgatcctgccgctgctgtgggtggatctgaacatcgatgtcctgtgcctgaccctgcgtctgctcattcatggcatcaagtggggcttcccgctgctgcagtggagcgctgccttgggaatgctgctggccggcgtttaccagctgtgcagcgccctgttgctttgcttttggccaacagccaggcagttccagaaggtggatcaagtggaacgcggcacggcggttcaggtgattggagttggactcggtttggccaccggacttcgaaaaccatcgattcatttggaccctgaggagcagcaccatctgctcctcggcggcggcagcttcattcccaagatggccaagacgtaacccagcggaggatcggaatgcatacctctaattaagatggggcaacactgtgatatttaggcttaagattcggtgtaaattattgtgctcatcggaaacaacttagggaacgtccttgcctacgtactagttaacgataactataagctagggcaacagttagagtggtaacaataagcaatatacagctgagcttgcactcgataaatacaggtcgatagctatgt

SEQ ID NO: 42498 - protein, 552 aa, DROSOPHILA
MKLFTNKNQRNAKLLRSAALGMTLLFFGSLVIISDPLQSILDTQLSLKPGTLLHRLWLLPPLDVYINVYMFNYTNVDEFTSGRASKLQLQEVGPYVYKEVLSNHNVTYNESNNTITYSPKREYVFAPERSVGDPKIDRIRAPNIPLMGVTTLASSLSMFAALGLSAITRQLNSQPMLEMSVHDYMWGYEDHLVELASRFVPNWIDFSSFGIMEKLFREGNESNVFNMNLPEPKDKYGMRMTDAPRGYTVDSINGERGFKGWQYNEETNGTMCNRIWGSHDATLFPLDMDENDEFFLYRRTFCRRLPVKFNRTTTFNGLDAFEFVMEPDSFDSEVDNANSSCYCKNNRCLKKGVGNVSPCYYNIPLAITYPHFMHADPSLLEPFDGLQPNVSRFTSTFVVQPQLGAPMQGTHLRLQANQVVGKVNFNRMMTPFENMILPLLWVDLNIDVLCLTLRLLIHGIKWGFPLLQWSAALGMLLAGVYQLCSALLLCFWPTARQFQKVDQVERGTAVQVIGVGLGLATGLRKPSIHLDPEEQHHLLLGGGSFIPKMAKT

SEQ ID NO: 42499 - DNA, 4168 bp, DROSOPHILA
taaataagctggtatttagtatagcagggcgcccaacgcaaaattgtaaaaaacaaatttaaaaagaatttagaataaaatgattactatctttagtcgtcagataatatatatgtacaaaacttgttggtagtagtattcttgcagccaccactgtatgcaagactgcaagactacgtgaccctgttattttgacattcactgtgtgggcatataaacatatgcatacctcgagatcccattggtgtctgattaggacgtcgcggcagacgttcatatcctcgatgccggtgagatcctggaactggaggaccttctccgtctgttcgttggtcagtccatcagcttccatctttcctgcagttgaaggcctccgttcccagttgttatcgttgttgtttgcttttacgcagtgcgtgcgtgtgtgtgcttgtgtgggtgccaatggcccgtgactgtctccctggtgttgtttttgttgtaagctggcctttgtccagtggctcagccgctgcggcgggggacgggggatgagtagcgtggtcactaaatgcttctactggtcgccaggagtcatttcaacgcacgccaaattgccgcactacaacgtctttaacatttctcggcaatttatttctttttcgcaggtgattgcttgctcttcttcttgcctttctgccaatgatccgatgaatttggttgtgaatgactagtgtgaccgcgcaggccgacgcgttctcactgcgaaatccagcggcaaacaaacaatttgtgttcgctttttaaaaaattatttttattatttatttgatctctatgcctggcgtggtaaaacacagaaaaagattaaaagcaatattgatatataattcaaaggtgttagataaggacaatgtgtagtggaatcagcatatttgtctaacatcacttggaaaatcgacggacgagctttggaattttcaggtaataaagcagcgggcacattcttaaatcagtccgaacaaaagcactcaaatttgaattgtgtaaatatctgaagaaataaatcaaaatgcatgttatttccacgtctaaaaaaaccgtgctctccgacttcgcggatctggagacaaagtctgagtatgtgcaccagaacgcagagcccacggactttcagttcaacggccaacgccgggtcttcgtggaggtggataaaatggcgggcttggccgtgatgcgaataaaggagaaggatggcaagagtaagagagaggtgcggatccccaaatcccacgtatgtaattaacttcccatttcacagcgcccgagattcaacgagtccgtaagctcaccatcgacaatgccttctgtgtggcgtgcgccaagcaatccctggaagagatcgctgtgggtcagagcggttgtgttaagctatacaactttcggacggcacagctcatccatcgttttccggcggacccgcaaaggagtactgtcctctacatggactacaacaacacggacgagtatatagccgccgtgcgcgatggcggggacatcagtatcttgggtaccaagaccaaacagaagaccaacaccttcaccatagatggcgagtaagttaaaggcttgcttgttaaaggattgcattgatctttcgctatcctgttaatatcagctctactcttgtgcgctttcatccgagcaaacgctttcatctgtcgatcgcttcctataaaggagccgtgactgtctatgatgtgcagggaatgcgaaagatttttcatgccagcgaagcccacagtgctccctgccgggacatcagtatgtgcacatcccaaccggcactgctggtcagcgtgggctacgattgcaagataaatatcttcgacattcgacgaaatcgtgctcaggcctctacggatcgcttgacctactcgcatccactatcgacggtggcgctgagtgaatgtggcacttatctttgtgctggaaaccttaagggcgaattaatagcctatgatatgaggagtacaaaggctccgttggccgtgaggagtgtacatgatgcggctgtaacacgtgtagcctttgtgcccgtgccaagtggggataaccagcagaacggtagcctcaacagctccgaaaatgcaactggtttggcgaccgaagctcctcgtgtagagcgtgcgcccagcgatgagttgcgtaaatcgattgccgctaatttgttgagcacccaaaaccagctgaccagtcttggttacggggtgtcaacacctaccatagttcgccgggattccttttgcgagttcctggatgcccaaggtccaagagctgtggatcgcatgtcgacccgcttgggcgcctcttacagagatagttttgactgggagacgctcaaccgaaaaccgcaaccttatgaaactgccaatcgtcaaagtctttgtcctccagtggcgtctggcccaagctcggtggataactccgtcaacagctccaccacggagtcactgcaacgcaagttactgtagagattattattttttagttataataagcttattacttgcagagaccttaagcggcccactgaaggatcggagcaacatttccggagacggaaagctgatgaagattgccgagacggacgagctctgcgaggagcagtctgccaacatttccgtggccagcagcacaggaggcggcagcgacaaagagaatcccccgccggttgacgcagaaatgaaacgccgtctgcgcttgctttcggccagtcgaaacagtaccccgcaccatgctaacatcacaccacaatcctcaaatcctctcttgaagcctcagcagttgctggccaaatcgtcaagcggactttccgcccaaatggatgcagattggcgcaaggaattcagcgagctaagagattttgtagaccagcgctgcgagaaggtggagcgcgaattggagtacgttaccttctctaatcagcggctattggctaataagatgaccaactacatggaccagcaggtggaaaacacaagggagatccgggacgccctggctttactacttcaaggagatagcttcatgcgcgagttctcgcgcctacaaaatgaaaacgaaatgttaaaggccaaattgaagttttaccaggagcaggagcaaactgaatcatgcggagagtaaaacgagggggagacatgttaataattaattgaaacattgttattattgtatttaatttattgttattatcaactattagtaacatttttcaaaataggttttggcgtctcatgagttttatgtaaattttaattcgttaatcgatccatttagatattttacaaatgttttagaatatttacctcggtctataaaatgtttttgaattcgttattaatatagtgctgccaaaagtgtaatgcgataagaaagcttcttaaaatgtattttttaaaacccttttcactttctgtactctagctttaagtgatcatttttcggattcgtcatgggcatgtccaccgatatggtcctgttgaagttctcgtagtcgacaatgtagcgctcgttttgggcgtcgtaatggatgatattgacgaaccgctggccccagaaaatctcccttggcagataggacgtcttggcctccgtcatctgcgctgtggcaggcgaagtgcccacaatggacacatacaactcaaattgggcagcattgaagagtttcgctgtggtgaactgagacaacgggctggtctcatcgatgacatggcacaccacatcgggccagagaataatctgctccccattcccctccagcttcagttccacgtgactttttatagtctcaccctcgcgcgtgctgtcagagaaatagataagatgggggttcgtattaattgcttgttttatccagcagcaagtactatctgaatggaaggtcagttcatttatgactttccttatgactgggtcaatatttcaggagtcaagtgtgattaaattgtttctatagcatttataaatattgaaaaaaaaacgttgaagatcaagacaaaataggaaaatatacccaaattaaccgcggattcttaagttctatgattttccctaaaatgcgactgtgactcaccgtttgtccacgatgatgtagactcgtatcttggactcgatggactgctgc

SEQ ID NO: 42500 - DNA, 1986 bp, DROSOPHILA
acaaaagcactcaaatttgaattgtgtaaatatctgaagaaataaatcaaaatgcatgttatttccacgtctaaaaaaaccgtgctctccgacttcgcggatctggagacaaagtctgagtatgtgcaccagaacgcagagcccacggactttcagttcaacggccaacgccgggtcttcgtggaggtggataaaatggcgggcttggccgtgatgcgaataaaggagaaggatggcaagacgcccgagattcaacgagtccgtaagctcaccatcgacaatgccttctgtgtggcgtgcgccaagcaatccctggaagagatcgctgtgggtcagagcggttgtgttaagctatacaactttcggacggcacagctcatccatcgttttccggcggacccgcaaaggagtactgtcctctacatggactacaacaacacggacgagtatatagccgccgtgcgcgatggcggggacatcagtatcttgggtaccaagaccaaacagaagaccaacaccttcaccatagatggcgactctactcttgtgcgctttcatccgagcaaacgctttcatctgtcgatcgcttcctataaaggagccgtgactgtctatgatgtgcagggaatgcgaaagatttttcatgccagcgaagcccacagtgctccctgccgggacatcagtatgtgcacatcccaaccggcactgctggtcagcgtgggctacgattgcaagataaatatcttcgacattcgacgaaatcgtgctcaggcctctacggatcgcttgacctactcgcatccactatcgacggtggcgctgagtgaatgtggcacttatctttgtgctggaaaccttaagggcgaattaatagcctatgatatgaggagtacaaaggctccgttggccgtgaggagtgtacatgatgcggctgtaacacgtgtagcctttgtgcccgtgccaagtggggataaccagcagaacggtagcctcaacagctccgaaaatgcaactggtttggcgaccgaagctcctcgtgtagagcgtgcgcccagcgatgagttgcgtaaatcgattgccgctaatttgttgagcacccaaaaccagctgaccagtcttggttacggggtgtcaacacctaccatagttcgccgggattccttttgcgagttcctggatgcccaaggtccaagagctgtggatcgcatgtcgacccgcttgggcgcctcttacagagatagttttgactgggagacgctcaaccgaaaaccgcaaccttatgaaactgccaatcgtcaaagtctttgtcctccagtggcgtctggcccaagctcggtggataactccgtcaacagctccaccacggagtcactgcaacgcaacggcccactgaaggatcggagcaacatttccggagacggaaagctgatgaagattgccgagacggacgagctctgcgaggagcagtctgccaacatttccgtggccagcagcacaggaggcggcagcgacaaagagaatcccccgccggttgacgcagaaatgaaacgccgtctgcgcttgctttcggccagtcgaaacagtaccccgcaccatgctaacatcacaccacaatcctcaaatcctctcttgaagcctcagcagttgctggccaaatcgtcaagcggactttccgcccaaatggatgcagattggcgcaaggaattcagcgagctaagagattttgtagaccagcgctgcgagaaggtggagcgcgaattggagtacgttaccttctctaatcagcggctattggctaataagatgaccaactacatggaccagcaggtggaaaacacaagggagatccgggacgccctggctttactacttcaaggagatagcttcatgcgcgagttctcgcgcctacaaaatgaaaacgaaatgttaaaggccaaattgaagttttaccaggagcaggagcaaactgaatcatgcggagagtaa

SEQ ID NO: 42501 - protein, 644 aa, DROSOPHILA
MHVISTSKKTVLSDFADLETKSEYVHQNAEPTDFQFNGQRRVFVEVDKMAGLAVMRIKEKDGKTPEIQRVRKLTIDNAFCVACAKQSLEEIAVGQSGCVKLYNFRTAQLIHRFPADPQRSTVLYMDYNNTDEYIAAVRDGGDISILGTKTKQKTNTFTIDGDSTLVRFHPSKRFHLSIASYKGAVTVYDVQGMRKIFHASEAHSAPCRDISMCTSQPALLVSVGYDCKINIFDIRRNRAQASTDRLTYSHPLSTVALSECGTYLCAGNLKGELIAYDMRSTKAPLAVRSVHDAAVTRVAFVPVPSGDNQQNGSLNSSENATGLATEAPRVERAPSDELRKSIAANLLSTQNQLTSLGYGVSTPTIVRRDSFCEFLDAQGPRAVDRMSTRLGASYRDSFDWETLNRKPQPYETANRQSLCPPVASGPSSVDNSVNSSTTESLQRNGPLKDRSNISGDGKLMKIAETDELCEEQSANISVASSTGGGSDKENPPPVDAEMKRRLRLLSASRNSTPHHANITPQSSNPLLKPQQLLAKSSSGLSAQMDADWRKEFSELRDFVDQRCEKVERELEYVTFSNQRLLANKMTNYMDQQVENTREIRDALALLLQGDSFMREFSRLQNENEMLKAKLKFYQEQEQTESCGE

SEQ ID NO: 42502 - DNA, 3593 bp, DROSOPHILA
ttgtccgccgcccgccgagattagtgcctcgaaatgtgccccaagatcttaagtaaaagtcggacgctatcagtgtatttattttgcgaacgatcaaatattgtcctaagtctggcaaatatttcactttttatacgtcgggagggcagcacaatcttttgcatctgcatctcttgactggaagttgatagtagatagttggtaagatatccggttgcgtttgaatttgccgcccacgtaatcgatcgaggcacttgtgtaagaacattttaaggacagataaggatacaactttaaactctctctggaaacttttataatataattgcatttagtttccttatttgtgatgataacagtcatgttacctaatttctcaagctaaaaataaaatattagcccagattaaaaaagaaaaataaatcttaaagatttgaatagctcagatcacaaccagactggttgggttcaaggctagatctatgtatgtaaaattcgtcgtagaatcaatgtataattcatacagagaagagaatgtcgaatttgaaattcgttttttttttataaaaccagacccagttaaaattgctctttattttaatttcaaaaacttgtaactttttatttaaacagtgggcgcgttgttttgtttgtcattacttttcatacacttttcgtcatgtcacgctcgtatatgtacaaaagaaataccaatgcttaggacgaatctaataatagttatgcacatacgttcatatttatttatattaaaatatctgccaattctcgatttgtacaattcgatttacacgtatttgtagaacatataggggggtttagggatacatgtatatatatatatttacagctagatattagacatagttttagggatctgctcctcagctaggtgttagacatacatagtttagaaacctcttcgcctccatccggctcctctgctataggaaatttgtttgctgaaattgattttacgtagttagggtacctcttccttgatagatgttgtttggggcgtcgtcatcgcgctgtctgcggtagtggtggggaagagcttggaggtaagggtcctcttgagctccatgatcggctgcgaatcctcctcctcttggtctctgctggacgatggtgctgccgtgtcagccgtcgatgttgccggcgcatggtccgcctcctcgtgcgaggatgtgggcgtgtcccgcgacgaggagcacgaactggacgccgatgttgcggttgactgatgctgttgctgctgttggtcgtgctgctgctgttgctgctgctgctgctgttgctgcgtgaccttgcccatgaagctgcgtatctcctcgaaataggattcctcagtaggattctcgcagaatctgcgtatgcagtgcatcctttcgctcacgcccgacaaggcactcaaggacaccgcatccgactcgtgcttcttgaggtgcctgtccagattcgtctgttggccaaagcatctctcgcatatctcacacttgaagggtcgctccttgttgtggatattccgcacatggcgctgcagattcgaggatatgctaaaggaacgttcgcagtatttgcatttgtagggctgctcgcccgtgtgcgttcgcagatgccgcgtcaggttcgccgatctcggaaagacttttccgcaaaacttgcaggtgtagcgatccttgttgcgttgcggcaagtttggcgtggcattgcccccggtggcagctgttctggccttgtttttcctccgcgtctgatagtcctgcagttgcggatgcggcaggaccggcgacaacttcgggttcggatgaggcagctccagttgcaattgctctgtgggcggtggccaggtgagctcgcatttcttgagcggatgccggaacgggaaatccgcgcccgttggactactggaggccgccggactgttcaccttgcccggcaaaaccccagcgaacacattgcgatactgcaagggcaagttcttggtcatggcttctaggagtgtgggatgtacggcaggtatcgaacattgcggtggtgttaagggcggtgcgttgggtggtccaccaccgcctcctcctcctcctcctcctccgccaccgccacctgcaccaccctctctcaaggccctcagcattttgcggctcatatcaaagcccaggtcggccagcgatgctgcgatatggttgttgttcagctccttctccttttgctgagccaccgccagttcactggcgaacatgatcaggttgctgttctcatcctccatgggtccttgatccaccaggtccgttttccgcttgtgtgccaaccgcagatccaacggctgatcgaaactgcttctccgcttgcccttggcatggtgatttaaggtctggtgttgctggtgggagtgttggtgctgcagccgcccagttgtcgttgccgacgtcgtcgtcggcgacgttgatgacgaggatgtggccgccaccgacgctgaggaggccagatcataaggtacgtgtgatatatacgatgtgggtattaatcctaaggcagggtatacgcagccctgtttcgggctaggaagcatctttcttggtgagtggtctttctctctcataactctcattagtcgcgaacgggcggtaaccgagtttttcctccgttttcctgcgttgtctttttgacttcgattgaataattgattgattggtggaatgggggttcgattgattgcccaggctgccaggttgccaagctgtaggttttaggttttgtgctcgctttctcgattttcaatgcgtctgatgccaaggatactcaaaatgattctgtttcagaactgccttcgacttacagtgattatgtacctgaaaggaaaagcaaagatttaccgattaataagattataagactattttaaacacaaatcatatgcctatcatcgaggacgacactttaattagtgacaaacgaaaggtagggcaaaaattctaggatcattcgttacaaattggttaaatttcagatagtatgatgattcatgattcgtcacaaaagtgaatttcaaaacttttgttaatggtgcaatcgccacaaacttttaatctcgtttattcaaacaattagttttaaaaagtttgatattaatacataactggacctttataaagatatacaatggtatatatctataacttttcattagacctaacaaattcattcaaaagctttgtttacttggacccaaaagaaggcaagtgcttgcacccattgccgaaattaaaatctaattcttgcctaataaacccagttccctggtgcgtcacacagttcgacttttcgcagctgtgtagatcatcggactatatgttttttactatctttatgtttaaggtaattccatgtacgtcattaagcggcctggagacacaccaacccatctaataatagtacagtgccgactgttcggcaacccaataaacatctttttggaccattttctggttattttcttctcttctcattttaatggattcttttgccacaatgccaaaaagttcgaaaaggaagggggccgccgaaatgtt

SEQ ID NO: 42503 - DNA, 1593 bp, DROSOPHILA
atgcttcctagcccgaaacagggctgcgtataccctgccttaggattaatacccacatcgtatatatcacacgtaccttatgatctggcctcctcagcgtcggtggcggccacatcctcgtcatcaacgtcgccgacgacgacgtcggcaacgacaactgggcggctgcagcaccaacactcccaccagcaacaccagaccttaaatcaccatgccaagggcaagcggagaagcagtttcgatcagccgttggatctgcggttggcacacaagcggaaaacggacctggtggatcaaggacccatggaggatgagaacagcaacctgatcatgttcgccagtgaactggcggtggctcagcaaaaggagaaggagctgaacaacaaccatatcgcagcatcgctggccgacctgggctttgatatgagccgcaaaatgctgagggccttgagagagggtggtgcaggtggcggtggcggaggaggaggaggaggaggaggcggtggtggaccacccaacgcaccgcccttaacaccaccgcaatgttcgatacctgccgtacatcccacactcctagaagccatgaccaagaacttgcccttgcagtatcgcaatgtgttcgctggggttttgccgggcaaggtgaacagtccggcggcctccagtagtccaacgggcgcggatttcccgttccggcatccgctcaagaaatgcgagctcacctggccaccgcccacagagcaattgcaactggagctgcctcatccgaacccgaagttgtcgccggtcctgccgcatccgcaactgcaggactatcagacgcggaggaaaaacaaggccagaacagctgccaccgggggcaatgccacgccaaacttgccgcaacgcaacaaggatcgctacacctgcaagttttgcggaaaagtctttccgagatcggcgaacctgacgcggcatctgcgaacgcacacgggcgagcagccctacaaatgcaaatactgcgaacgttcctttagcatatcctcgaatctgcagcgccatgtgcggaatatccacaacaaggagcgacccttcaagtgtgagatatgcgagagatgctttggccaacagacgaatctggacaggcacctcaagaagcacgagtcggatgcggtgtccttgagtgccttgtcgggcgtgagcgaaaggatgcactgcatacgcagattctgcgagaatcctactgaggaatcctatttcgaggagatacgcagcttcatgggcaaggtcacgcagcaacagcagcagcagcagcaacagcagcagcacgaccaacagcagcaacagcatcagtcaaccgcaacatcggcgtccagttcgtgctcctcgtcgcgggacacgcccacatcctcgcacgaggaggcggaccatgcgccggcaacatcgacggctgacacggcagcaccatcgtccagcagagaccaagaggaggaggattcgcagccgatcatggagctcaagaggacccttacctccaagctcttccccaccactaccgcagacagcgcgatgacgacgccccaaacaacatctatcaaggaagaggtaccctaa

SEQ ID NO: 42504 - protein, 530 aa, DROSOPHILA
MLPSPKQGCVYPALGLIPTSYISHVPYDLASSASVAATSSSSTSPTTTSATTTGRLQHQHSHQQHQTLNHHAKGKRRSSFDQPLDLRLAHKRKTDLVDQGPMEDENSNLIMFASELAVAQQKEKELNNNHIAASLADLGFDMSRKMLRALREGGAGGGGGGGGGGGGGGGPPNAPPLTPPQCSIPAVHPTLLEAMTKNLPLQYRNVFAGVLPGKVNSPAASSSPTGADFPFRHPLKKCELTWPPPTEQLQLELPHPNPKLSPVLPHPQLQDYQTRRKNKARTAATGGNATPNLPQRNKDRYTCKFCGKVFPRSANLTRHLRTHTGEQPYKCKYCERSFSISSNLQRHVRNIHNKERPFKCEICERCFGQQTNLDRHLKKHESDAVSLSALSGVSERMHCIRRFCENPTEESYFEEIRSFMGKVTQQQQQQQQQQQHDQQQQQHQSTATSASSSCSSSRDTPTSSHEEADHAPATSTADTAAPSSSRDQEEEDSQPIMELKRTLTSKLFPTTTADSAMTTPQTTSIKEEVP

SEQ ID NO: 42505 - DNA, 7337 bp, DROSOPHILA
gcaacaatatcttgttcaaaaaattgcagtagtcttgtggcataataatttgccttgcaaaaactataatttaatttaactctcatttccattcactgctcccagaatatttgtggcatttctccccacaaaaaaccatgaaatatgagtgatgaccctcgttgcagggacaattaacttgcggtgctgcatcgtaatgttcgccaatctgtgagtagggaagattcagattagaatggtgctcataatggggggggggggggcaggggttcgagcgttgaactcagattacaggactcccccaaacgatatgctcgcatagaaatggctacatttcggggcaatccaagttgctctctggttatatggccagaattccgcgcagcccgtggggagtgcgcaaactgtttgaaaaattcatattatttgtaagtagttgcgggcacaaactatgaactatgagccacccggtccacgccctctgcgtcgcaagtagaaattgtgtggcttagtgcgcaccaaaaactttggggagcaatcgaggaaccttatcaggcggatttatgccaaatgatggcagattgccaagctccagctacaaaactgcagggatagatacggattcaaatggcaacgactgcgaatgctgggcttggcaacatgttttttagtgtgtctgtctccccaattccttttcttttattttccccatttttctgttttttctcggttgttttttacaattttttctggagtataatggctagaaaaagttgtgccatacccgtgactctgaaaatgtggacattggtagtggttagtgatataaatgaatgaaattgaaaatgttcaatggatttctatttgatttaaaatattattcaaaaatatttgataccaacaaaattttattgaagtgctgtaatgattgaatgataattccattaaagtacatttattttctaactaaaattgtaaagaaatgtattcttcctatttcaatgccatgttctgttatttatatccactgtgcggcgcttgagaagcggcttctgctgcggtggctccgccagttggcaatgccaccgtggagccaatttgctgcggttcatcaatatgccaagctgcgcacatccagcctgtccaaagccacgaccacatccacatccccgtcgttggccacatccagccaaatggccaggcaccgggagccaaccagaatggcagacggatgcggatgtggtttggtagctctctgcactccctgccagatttgctgctcctcccgccctcaattgatcggcccccgaggggcggggcggggcagggcagtggccgtcgaggagcttaagtggctccacgtactgctgctgaaaaaaatatgtgcataaatttaaagaatctcaatttacttggcccgtgttcatttttgtgccggctgctgcaaagactttgcctggggcctctgtcttttcgattctacgattctgtgcacttgaaaataataaaatattttttaagttcttgattgtggatatcaatccaacacctactaaagaaagttttaattgttatcttatatatatattttccatttttaaaagatttctatcgaataaattacgaaagtgatttttacgcaaccaaaagacattaggaagtcttatctgtctatttaaaatgtaattgattgagatatatttataacttaaaagtagaatttggaaaaagcatttcgtatacatttttctcagtgtgcctgctcagcctggtgatttgtgagctcaattatgctacattttttgtcttgcccgcccacctccacttcccctgcttttcccgctccaccttggccgtggtcgttttttgtggttgtcactttgttatttattcagcgccacggagcaggtctggacgtggatgtcgtcgaatggggagtatggaagcagactccacggacctggaagacttgggatggagctgtgacactgaggccgttaatgagttcgttcgtcttcgcgctccgcatttggatgctaatgagtggatggcatccaataaattcagttcgccgggctttgcttttatcgccccacttgcataattcacatcgctgcagggttgccctcgatctgaatccactccccgtgcgggggtacagaggtcaatagaaatttatggttcgcattgttaacgccactgattacaaattatttgtattgccccttcatcagtggcgcccaggccttcttgtcttgcctgattactgattgctggttattttatgtgatttcctctgaccgtgctcattggatgatttactacacccagctaactgatagtactgctgttctcaagggatgcttcttaagatagtttaaacaaaaataaaaacattttgtatcaactaagccttaacttgacgtagctctgacattagttaaattgatattgggttaatgagtcattttttagatcattctctgcattcattaattatttcatgcatttcctcgacacacattgatgcaacctttaacggcactcctcatatcacgccttaatactgtgcttctgataactctaagtggattcccggttgttttccaccttatttctaaactggtagctgatgtgtctataagaaggaaagaagactccagaagaactatgtcatgtctcttaattataaaaagaaatgctagtttcttaaaaaataattttatcatgggtatacccttaatagaagaaatgcatgatttttaatagattttaattctcagtcatgttaattttagtccttcaattaagaatcaatttcatggttatttattattcaaacttagagaaatccccaaatatgcgtgcttagcgcacccatcgatttttgacacatcccaagttatgtccatgttagaacgtaagctgttcaaagttatatagttccttacgcccattatggataaaccccaacgaaaatagcttccaagcatcctcgactcaagtcaattatcatcatgagaaatgtcttctcagtcggcgggtccaatcgccttgcgtaattgtcgagtaacaaacaagattgttaaccagattccgcgtattccaccactcggtcgtcggccattgaaacgatggttctaataagatattcatacatatagatatctgacgcaattccgacgggtgcggcacacgagcgccgcctgccggccgaaccggcagtctgcccagtgggagatacaaagatacccagatacatttacattgatgttatccttcagctgcaactgcagcctcgggagacgaattccaatcggccgattaaagcagtccgccagggggcgctcgcgtgcgtttatcttgcgatggctgcggcaaagcaaatcgggtttagctgccggtcggccatcttggatttatctggcaatcacatttgtcagatactttcgaagcgctgtgcgtccttttctcgcacatgcgcatagtggcgtttcaggcgtggcaacgtcgacgtcgacagcggcggcagctgcgtcgcccacgcacaccactgcacgcacgaataccagcgcatttcgtaccgcccccaaccgccgctcattcagacctggcctcagagcccgtatctgaggccaagaaaccgcacttatttattgaaactcggttggcctcttcgggactctagaccggggatctctatactcatagataataccccgaaccatcaacgcattggatttagtcatcttcaactggggcttccttgaataaaaatatttctaccagctattacatttaataaaccatattataaataacataattaaaatatttttaaattaataacataaaataagtattggaacgctttaaatatttttctttacccaataccaagactttcgtaatcgttccattttaaaacatttctttcatttctataagatatattttaatatttccacattttaatccgctgtgttttctattattatattttcttatgatacatttaacattccgcaatttatattcaatagtattttgtagtgcaaagggctccatctaaattaatttaatacaatttaataagcattttacagatatagttgttcatagttgttagtggaccgaatttaatttggtcgacttgccgacggcacttcaagctcgctttgaaatacgctcttttcagttccgccttactgtttgctggcatttatgcaaattgctgtattgcggaccacacactggcaccagctaattgacaattagctgacaaatgctaatggtgaatgccaccgacccattggaatggagactcgcagccttgactaattgaggcgacaattggcggcgcccagaatttattcaagccacgaacttaggtttgcttttcgtaaatcttaaagtcttcaagagttgctcggcgagtggccatgtttgcgtatctccatttgaaaataaacgcaattcaatttgcataactgaaatgcagaatttattttaattcaggcattgcataaaacgtacttctttatatgcactcacacagccatactcggagtttccgaggagggatccagctggaattacaagagccatttatgcaaatgccccgctccgactgcatctccatctccatctccaactccaactcctattccaattccatgtccgggctcctcctggccaagatggaatatttcagtcacgttaattcattcacgtttaattcacgaataaagttcgtaacttatatcgtgctcataatgcatgcaaatttatcacccccgggaaacggggagggtatccaatgatatccaacccagcaggtgagtccattaagtgttcgatttacatccgattgccagctggctttcctcgccgttctgcccgctgatttatggagaccccttggcccggacttccatatagcatccagttcctgctcaattcgcatcccagcgtgcactttgtgctccttcccgaacgacttgataagtcgattttggccccacagctaccacacaccccgaacaccggaaataattaaaagagccaaagttctggcaatatggcaacatggccgaggagacgaatttcattagacaaactgacaaaatgttaccgagaacggtccgaatctgctggggatataaaagaaaagtttggcaggccaaaatattggccaacactttcctcgtccaaattaaaaagatatgccggctcaagtgcttcgagtttagtcgcctttaagactcactcccatttttgcgcccaagcgaattatgtttagtctcgggccatgacattcacgaaattcgagtactcgaaaacaaacaggcgtagacatggaagacataaataaatttcttcatattttcatatttgccgggttgttgtttgggttcttttgtttgcctcgcttttgtgggcacacttaggtgtgctcctccagccgaaatagaagtcaacatccaggcaattggggcacttacctatatacaaagcgatgcattgtgagaaatcgggggaatgaagataaaacactagacaataacacgcaaggcggccagataaaagtggtcttaagcttaaaataataaaataagcgtttaaggttacatatattaataaattagttagcatttctgtaatgcataaattactgagcgaattatatgaaaggaacttcttcaggggaaaaaaaaaattaaactgttcaaacaaaattaaatagaaagcacttatttttttaatattttaaatattttttaataaaatgtaattcaaatagtacacaattttggaatttacaattacgacgagctatcttatatattttagtgtatttttgtgtacagccagaggacgtcacttggctgaaatgcaacggctgtcgtccggaaatggcaaccagcagactgtagggacttcctatccgcccccaaaaaattccggaaaatccatgcggaatgggaacgaagccattcttccgaatcgttgccttgtgcacaaataagggaaaagtcagagcacgggcacagaataagtgcctataagggtaccggcttggctagtttttcctgggggtgtatattcctacggactctcggctccatgtccgtgtccggcatccttatccagattccggattcgctgcaactgctgtgcaaattacgtagaggaaaagcgagcggtggaggcagacgacacctacaacgtccacggggattgcagccactcgaaagagatttactttgggcatttgctggtattcggtcggtggaccgaatagtaaggaatcgcggggcggggactgctcctccatttgccaactccatctgcgtccacatttcgggacctcgacacgtttggtgttggcaaaagttttctcattttggcaagatgctcgctcgtaacgaaaattgtcgagttcgccaaaacgccggtgggacgaaaggagcggatgagcggggtggatgagccgtggtttagaggcggtacctagggaaaatggaaacgcaccgcatgcactggcgacatttctcattaaaagttttcgacattttgttgtctcaacaaacattcttatcagcagacagaagccattccacttccgaacttggtcgacggaggcggcaaatgcacaaagccaatgtggcggccaggaaaatcggaagacaggtgtctgacagcttaatcggatgtaatgaaatatgggtggcttaattaataagaggttgacagactgggaaacataaattgtgggatatagtaagtgtgtaaataagagagaatccgttaatagaaaaagtggtagtatagtttatcaaaatgggatggaactcttggctttaagtattatcttaacttattactactttttacatgtggaaaaagtgtcttgtttactgatctctgggctgcctttcacttttcttagcgatcgcatacgaacacatttcttgggcctgccttgagtgtaattatttccagtttttaagagccaattacgaaaatgagccttgcctatgccacattgctgcaataaagtatgaaatgataatttccggaaaaacagcggaccttgaaactaaattaggcgcaacctgcgtgcaattatcgttagttattctccagctcgcactttttgcaaagggttgagttagacaaaagggatgggctcgagctctgagctctgagttctggttcggttcaatgtcagtgagccaggcccgcggctctcggggccataaaacaaggtcgggcataaaaaacgattcacaaaggcaagggttctccgcccacaaggattcagacacacacgc

SEQ ID NO: 42506 - DNA, 1273 bp, DROSOPHILA
atggaggagcagtccccgccccgcgattccttactattcggtccaccgaccgaataccagcaaatgcccaaagtaaatctctttcgagtggctgcaatccccgtggacgttcagttgcagcgaatccggaatctggataaggatgccggacacggacatggagccgagagtccgcacttattctgtgcccgtgctctgacttttcccttatttgtgcacaaggcaacgattcggaagaatggcttcgttcccattccgcatggattttccggaattttttgggggcggataggaagtccctacagtctgctggttgccatttccggacgacagccgttgcatttcagccaagtgacgtcctctggctgtacacaaaaatacactaaaatatataagatagctcgtcgtaattctggatccctcctcggaaactccgagtatggctgtgtgagtgcatataaagaaatacgggctctgaggccaggtctgaatgagcggcggttgggggcggtacgaaatgcgctggtattcgtgcgtgcagtggtgtgcgtgggcgacgcagctgccgccgctgtcgacgtcgacgttgccacgcctgaaacgccactatgcgcatgtgcgagaaaaggacgcacagcgcttcgaaaccatcgcaagataaacgcacgcgagcgccccctggcggactgctttaatcggccgattggaattcgtctcccgaggctgcagttgcagctgaaggataacatcaatactgccggttcggccggcaggcggcgctcgtgtgccgcacccgtcggaattgcgtcagatatctatattgcacagaatcgtagaatcgaaaagacagaggccccaggcaaagtctttgcagcagccggcacaaaaatgaacacgggccaacagcagtacgtggagccacttaagctcctcgacggccactgccctgccccgccccgcccctcgggggccgatcaattgagggcgggaggagcagcaaatctggcagggagtgcagagagctaccaaaccacatccgcatccgtctgccattctggttggctcccggtgcctggccatttggctggatgtggccaacgacggggatgtggatgtggtcgtggctttggacaggctggatgtgcgcagcttggcatattgatgaaccgcagcaaattggctccacggtggcattgccaactggcggagccaccgcagcagaagccgcttctcaagcgccgcacagtggatataaataacagaacatggcatt

SEQ ID NO: 42507 - protein, 424 aa, DROSOPHILA
MEEQSPPRDSLLFGPPTEYQQMPKVNLFRVAAIPVDVQLQRIRNLDKDAGHGHGAESPHLFCARALTFPLFVHKATIRKNGFVPIPHGFSGIFWGRIGSPYSLLVAISGRQPLHFSQVTSSGCTQKYTKIYKIARRNSGSLLGNSEYGCVSAYKEIRALRPGLNERRLGAVRNALVFVRAVVCVGDAAAAAVDVDVATPETPLCACARKGRTALRNHRKINARERPLADCFNRPIGIRLPRLQLQLKDNINTAGSAGRRRSCAAPVGIASDIYIAQNRRIEKTEAPGKVFAAAGTKMNTGQQQYVEPLKLLDGHCPAPPRPSGADQLRAGGAANLAGSAESYQTTSASVCHSGWLPVPGHLAGCGQRRGCGCGRGFGQAGCAQLGILMNRSKLAPRWHCQLAEPPQQKPLLKRRTVDINNRTWH

SEQ ID NO: 42508 - DNA, 5618 bp, DROSOPHILA
atttcccctctccagaactgaaaacgggtgctgctcgatgtcccctttgtcatgacgatgttcaccttccccaagacggcggctggaaattgcatctcctcagcgccggcggctgtcccgggaatatacgcaagaggaatctcaagaagtcaaattagaaagcgtacacttaatcgatctattggcctagcgaattagcgaatttattagagcaactattctagtcaggatacctactcaaggaagctatctaatttcagtcgcagcagccgaactcatttagttaaacaactaaaccaattcgtttctcactcagagcacttaagttagtcacattttgttaagccgattagttagatctattatgtgcattcttttgtattttttgtacgcaatgtgatttgttaaatgtaacgagaatttttgaaacgtccttacaataaataaagcccatccataccgttttaaacatgaatttgagtggtttgaatgtattactctagtccataaatgtgttaccttgcttgcattaaatttccaatttatatgcttggagtgcattccttaataaatttttaattgctttgcatataaggaatatgcaacacaattgcacgatttaccaaccataaatggttatgtgtgggcaatgcagtcattcaaatagaaacaactgcagtccacagcattaggaaaatgcaaataaaagatcaaataatataaattgtcaaacatgggtattttaaactttaatatcaaacaacttatcaagaaattaactacttcgtttaatttaatcatttttacatacgtaactagaaaatctaacattaattgctcttgatagctatacaatcattttcgaaacaaatcggattgaatcgactattacgatttgctggaccactatttttgcgcgctgcgctgtttcgtttcagcagtgttgtaaaacctccctagggtagcgcgtcagtgttggtggctgtgcgtgtgcgagcgtaaatgaagaaaaaacagccggcggcagcggcggcaacagaagcggcagaattcagttttcgcaataaaaataaacgcgagctatagctggccgaaagtcgtgcccagaattttcacttccgcatcggttaacgttagacttctgtcatcatgttctgaccatccggctaaaaacgtccaacgcgcgctcaggagttgcctttatcaaagaacccccgcctcctcggtgctctcctttttgaagaccgtcgcgtgtttttccgcttagattaaaaatacatagttgaaccatcgaaaatgaggcaactattcagacgcttgatgaaccaccagtatttgacgcaggaccagatcaatgggttcgacaactacaaggtgggccagaggattcacactcacaaaggagcatcgtgggcggctgtaccttccttcaatagggggtgaccttcccgatgaagccagaacctaaaccaaaaccagttctctgtacaccgtacttgttttcaattaaaattctttttatagaaagccaccaggccaaacaaagcgaaatgcgaaaaaaagaaagctattgaaatagtcgttaaactgatgatggtgatgagtttcccctctttaatcagaaatttttcttacagtacagtgccattgatacctcaccgctgagtcagtatgtgatgcatcccttttgggattggctagttaaggtgagtgctccacggaattgtatcacgcaaaaatcaatactcataagggggcaacccaccattacaatcatccacccaatgcagttctttccgcgctggtttgcgcccaacctgatgacctttctgggcttcctgttcagcgccatgaacctggtgctgctctcctactacgactggaactttgatgcgagttccggcgaggagggcaccacccccattccgtcgtgggtctggctctgcacggccatcaacatctttttagcctacaccctggacgggatcgatggcaagcaggcccgccgcattggattatctggtccgctgggcgagctcttcgatcacggtttggattcatataccgccatgttgatcccgacgtgcctgtacagcatttttggacgcagtcgcgtgtattcggtgcgacccatgaggatgtactacgtatgcctaacggtctacttcaacttcttcatttcgcactgggagaagtacaacacgggcatcctctatctgccctggggctatgacctcagcatgtgggggagcaccgccatgtacctggtcacctggtggatgggcttcgagcgctggaagttcgaactgccgctgggatcctacggaaccctaccattgggcaatgtcatggaggcagtgctgcatgtcagtgctatggcgaatcttccactagtcataattaatgtctacaagtatgaaatgccaatcaattttatgagttcccccactaaccttctatttttagctcttatgcgcatcgcacaggtcgtctgttgtccttttgggaggccgttcggcccatgtggcccttcatcacctacttcgtcatactgctcgcctggccatatgtatcgccgaacgacatcatggaaaaggatccacgcgctattttcatgcttagcggcacaatcttttccaacgtcagcgtaagtccttcacatttcttatatatatggcatacaagtggaattgtattagttgattcagttaacctttcgatttgactcttgtgcgataattgtttagttaatattaatttagcactgtcttggtgcctgtaaattgtaaggataagaggtaatcatgccttgcttaaaatgtaatcggccacagaaacgcttatcaaaccgtgtcgcgtgtctggcctgaatcatacataatctagataaggcaggtgtgtctacatctttcgctggccccttggcacggagttaactgccaaacagccatagaccacatttaatgagtcatttgacttgcctgccccatatcggcatttcacgttgatataacgaaaacgcacagcgaaagtcgttcggaatgccacccttttgttgtggtggccgtcgctgtgccaaggacttggtggatgaaaatctgaacgaaggtggtcgcgagtcgctaagggagacgatatacaccacgaccgcggagtatgaacgaccattgtccctgaagttttatgcccgccacgactggccctattttaattgcacggaccaagaggtgcaacgcatacgggagaaacttgacccggtgtcactgcagaacgcgcgtaaaattatcagcctggacaagggcgttgacgagaagtacgagatgaagcacaacacgccgcagcccatgactgtcaaccagatatacggatggtactcggatagagcccaccgctatctgaggcgcgaccgcggcacattcgtctttcctcacgagaacgatcccatgattgagcaaattttaaggaacaaactcaaacgctcttaaagtttccatcttgttgcaaagtttagtgcacttacagtttagattcagaaaatttttttttttgaaatatgaacattgttctgacgaaattaaatagtgaccaaatgacactcctccttgcttcttttattgcagtgtcgtttaattgtctcccagatgtccgtgacgagatgcgaggcctggcattggcagacgcctatgtttatcctttccttcttgacgagcctgtggattccgctactggagaggccgttgctatacttgcttctaattgtgaccacgctgagccactggcaatacggggccagcgtggtaaaccagatgtgcgagcatttcaaccgggtctgcttcacggtccataagcgagtgccgcaggaggagctccccaagaagaagactctgctggcagaggaaatcagccaggcagataagccacaagcggaggagccattgaagaaagatatataaggcatcggattgcgctattttggattagttgcgagttattttgcaagtttttctgtatatcaaggaggctgtttagttaaacaattcttgtgagattatgtataatttgtcttagttagaatatatctaaaaaattgactttatattagtgctacaataacattggagccatttcggcacatttccaatgactattcacgtaatgctctcttccaatgataatttttaaactcggtttacggttaaattcccacttgacgttatctgtaatccgtattgtatccaaacttcaaagaccccttgtagatcgattgaatttacgagtaatcatgacaagtgatctaatctgctgctaagatatccaataagtattaggtagtaggctaaagtagcggccaggcaagtttcaatccgcaaactcaatttaactttgcaactacagagcagctaactacttgttctagcctttagctttccaacttcattgctacggttacgcatatttatccttctaattaaaaacgctcgcttccgctgaccttgaatagcaatcaatgttttatattcgtctagaataattatctccatgcttaattttattttgtttccattgtacattgtttgaaatgctccacaaacacgaatacacgaaacgaacttttctaactaaataaccgcaaagacctctaattatttaaacacataagcatattcgttacttttaaacttaaaccgaaacccaatgtcattcaactgtaatgtgacgtcgtccatagcgccactgcacgctttattgtatggaatctattcatgtaccccccaaacgggctaccccccgccccagtacacattgtgttaaagacaagacagtatacaaataaaaaaaaaaagtattttgaaattctcacaccgagttcgtcatttgatttatcaccatatgctgaccgcctttatcgtgacttcagatcaccaagtggactgtttgcctgcctacagataaatttgtagaccgtaatgacagctgaaagtttcaaatcagcttaaatgctaaaaaaacatttgggatggggaatttattctacatcttagtatatgatcactgtgccattaggagttagcttcaaggatacgtaggccaaagttcgtacaaggtatctatgtatatgaaagtaagcatccttaagatagttcattattaccgtactgatggtcgaagtttgtagatcatttttacgagtacatataagtacatatagtgctgcacctatgtttggcgaaggcataaatcaattgaatagaatgctcatgatcggtttgatatcgtttgctcaggtgacgggttctggggatgcgtacgtgacatggttgttagcccagtcaatgggcgaccaaacgcttcctcattagctaattggcgtgaaaatcagccaccagacccactgtgccgggcgatgggaaccgcgttgacaggcccacctccgcccggccccgcccgcctaacggctggccaatatcaataagtcgagatgtggacggagaaggagatggctaccaagtcacgccgtcgaaatgggcacggccgaacaaaaagagacggtcagaaagtaagtggcatgaataaaagcaaaaaccagaacgagaatcgggcagagagagaagaaagcc

SEQ ID NO: 42509 - DNA, 2638 bp, DROSOPHILA
aaatgaagaaaaaacagccggcggcagcggcggcaacagaagcggcagaattcagttttcgcaataaaaataaacgcgagctatagctggccgaaagtcgtgcccagaattttcacttccgcatcggttaacgttagacttctgtcatcatgttctgaccatccggctaaaaacgtccaacgcgcgctcaggagttgcctttatcaaagaacccccgcctcctcggtgctctcctttttgaagaccgtcgcgtgtttttccgcttagattaaaaatacatagttgaaccatcgaaaatgaggcaactattcagacgcttgatgaaccaccagtatttgacgcaggaccagatcaatgggttcgacaactacaagtacagtgccattgatacctcaccgctgagtcagtatgtgatgcatcccttttgggattggctagttaagttctttccgcgctggtttgcgcccaacctgatgacctttctgggcttcctgttcagcgccatgaacctggtgctgctctcctactacgactggaactttgatgcgagttccggcgaggagggcaccacccccattccgtcgtgggtctggctctgcacggccatcaacatctttttagcctacaccctggacgggatcgatggcaagcaggcccgccgcattggattatctggtccgctgggcgagctcttcgatcacggtttggattcatataccgccatgttgatcccgacgtgcctgtacagcatttttggacgcagtcgcgtgtattcggtgcgacccatgaggatgtactacgtatgcctaacggtctacttcaacttcttcatttcgcactgggagaagtacaacacgggcatcctctatctgccctggggctatgacctcagcatgtgggggagcaccgccatgtacctggtcacctggtggatgggcttcgagcgctggaagttcgaactgccgctgggatcctacggaaccctaccattgggcaatgtcatggaggcagtgctgcatgtcagtgctatggcgaatcttccactagtcataattaatgtctacaactcttatgcgcatcgcacaggtcgtctgttgtccttttgggaggccgttcggcccatgtggcccttcatcacctacttcgtcatactgctcgcctggccatatgtatcgccgaacgacatcatggaaaaggatccacgcgctattttcatgcttagcggcacaatcttttccaacgtcagccgaaagtcgttcggaatgccacccttttgttgtggtggccgtcgctgtgccaaggacttggtggatgaaaatctgaacgaaggtggtcgcgagtcgctaagggagacgatatacaccacgaccgcggagtatgaacgaccattgtccctgaagttttatgcccgccacgactggccctattttaattgcacggaccaagaggtgcaacgcatacgggagaaacttgacccggtgtcactgcagaacgcgcgtaaaattatcagcctggacaagggcgttgacgagaagtacgagatgaagcacaacacgccgcagcccatgactgtcaaccagatatacggatggtactcggatagagcccaccgctatctgaggcgcgaccgcggcacattctgtcgtttaattgtctcccagatgtccgtgacgagatgcgaggcctggcattggcagacgcctatgtttatcctttccttcttgacgagcctgtggattccgctactggagaggccgttgctatacttgcttctaattgtgaccacgctgagccactggcaatacggggccagcgtggtaaaccagatgtgcgagcatttcaaccgggtctgcttcacggtccataagcgagtgccgcaggaggagctccccaagaagaagactctgctggcagaggaaatcagccaggcagataagccacaagcggaggagccattgaagaaagatatataaggcatcggattgcgctattttggattagttgcgagttattttgcaagtttttctgtatatcaaggaggctgtttagttaaacaattcttgtgagattatgtataatttgtcttagttagaatatatctaaaaaattgactttatattagtgctacaataacattggagccatttcggcacatttccaatgactattcacgtaatgctctcttccaatgataatttttaaactcggtttacggttaaattcccacttgacgttatctgtaatccgtattgtatccaaacttcaaagaccccttgtagatcgattgaatttacgagtaatcatgacaagtgatctaatctgctgctaagatatccaataagtattaggtagtaggctaaagtagcggccaggcaagtttcaatccgcaaactcaatttaactttgcaactacagagcagctaactacttgttctagcctttagctttccaacttcattgctacggttacgcatatttatccttctaattaaaaacgctcgcttccgctgaccttgaatagcaatcaatgttttatattcgtctagaataattatctccatgcttaattttattttgtttccattgtacattgtttgaaatgctccacaaacacgaatacacgaaacgaacttttcta

SEQ ID NO: 42510 - protein, 550 aa, DROSOPHILA
MNHQYLTQDQINGFDNYKYSAIDTSPLSQYVMHPFWDWLVKFFPRWFAPNLMTFLGFLFSAMNLVLLSYYDWNFDASSGEEGTTPIPSWVWLCTAINIFLAYTLDGIDGKQARRIGLSGPLGELFDHGLDSYTAMLIPTCLYSIFGRSRVYSVRPMRMYYVCLTVYFNFFISHWEKYNTGILYLPWGYDLSMWGSTAMYLVTWWMGFERWKFELPLGSYGTLPLGNVMEAVLHVSAMANLPLVIINVYNSYAHRTGRLLSFWEAVRPMWPFITYFVILLAWPYVSPNDIMEKDPRAIFMLSGTIFSNVSRKSFGMPPFCCGGRRCAKDLVDENLNEGGRESLRETIYTTTAEYERPLSLKFYARHDWPYFNCTDQEVQRIREKLDPVSLQNARKIISLDKGVDEKYEMKHNTPQPMTVNQIYGWYSDRAHRYLRRDRGTFCRLIVSQMSVTRCEAWHWQTPMFILSFLTSLWIPLLERPLLYLLLIVTTLSHWQYGASVVNQMCEHFNRVCFTVHKRVPQEELPKKKTLLAEEISQADKPQAEEPLKKDI

SEQ ID NO: 42511 - DNA, 5347 bp, DROSOPHILA
cactgaacaatatttaaaaagttcaaaatcactgtacagtacttggtattttaaacatccatcacttttccattcaaaatatataaatattgaaaagcatgacatacgatgtttttttttttttattttaacttagtgtgtcaactatctttataaaaaaaattaaaattttctgggaatccaatagaaagctcagtctggagatgaatcctcgaaagcggagctaatttgcaagcaagactcggcatccaatagtggatatctgcagatcgtccgatttgagaactccgaaatcatatgcttttcattcctattttctttagatcccggacaattgatttctgttttttttctgttttgattttcatcatcgattgattaatttccatgaggacattgttttcaaagcttttaagaccgcgaataaatccagtctcattcagtaaagattcgtgaaggcaatttcgtgtgatatcaagatatatatgtatattcggaaataatgttcacgtgaacctcgcgatttggaagttcaatcctttgaaggattgaatgattaggacgccatcctttatatgttttagatataaatatcacccttcaccttctccagtttgatacctatcaatattactagggaatgcattacgacggaattcaaaacatcttgaaaaacctccaattaccccagttcagattgaccgttttattgcctcccatttttatagttccgaagaaaattacgaacgcagaggcatcattttagattacctagattgccaagtttcataaaacaaaaccatctttagattaggttttcaatatttcgggtttgctgatttcgatatcgataagaaactgacgtatgtatgtgtgaagttttaatgggtaaaaatatcgatattctggcgaaattttatgtaaagcaaaatgtgaatgtaaaaatactaaaagtggtgagttcgatagagccgcgtaaaaatattttcattatcgataaccgaagtattattaatctttgccaaagaccagctttggcattacaatacaattttggggatagattaactagtgcagcccagcaggcagcaccgtgatttgcaacaatttgagcctcactcattcaagaaccttccagcaactagttcgcctagtatatatacctgctctcacccagctgcacttgtatacacaatcgaacggccgaacaaaaactacgcagtagtcgagagctccaaattaatagaatccgtcacataaattcgccgcaacaagttaaacgagaataaaagcgtcagcatcgatatatatacatacatatattcaaaagtctgtcgaaactacagaatacgttgcgaaaatgccggagaagctgttgaaaatcacctaccagggcgctggaccccagaaaaagataaatgcatacctgcggatgccctcccagaattacaccatattgcgtcgcgaaatcgagctgtatcttttccaggagcgccagttacccaaatgcgacgtaaggaccttctggatcggtgagttttacaatgaaaatgccgcagagtgaatgtttgctatacatacaaacagttattcgcaattgcaatcgagtcgcaaagattgcaacatatgtgcatggtataagtacattcgtttccatacataactgcatccgtccgagcagtgctgaccatttagcttttaagtctcgttacttaaaaaccagcccaaattattgcgtactttgcccaacaaagcagggattcacctagatagtattcctgctcaatgcttatcattggcaaaattgtgttgacacattagctgataaatatgtacatatatatttttatggtacaaacgtggtcaacatattagatgcactgtttcataaatggcacacatacaaaacatttttgattttacatatttctgaattctcgaattatacatatatattttaaatacatctaacgcgctttttaatttgtaaagtatgtgtacatgtactcatatacatttacatagatcaaacgggttgtgctggtacaaccacaactgtagctaatttgtctaactagagccctcagtgattcacctttgataacaaaacttcactgattcataattgattttattttcctttgcctattctaacttttgcagacgctgataaagatgaaatcgaaatagtcaaccaaaatgactatgagattttcctggccaagtgcgagagcaatatgcacgttcaggtggctccactggcgcccgtagaggagccaaaggccaccaagcaagagggttcttcggccaacgctgaagctccttctgtcgacgatccgagcaatttcaccatccacgacgccgttgaatgcgatggctgcggcttggctcccttgattgggttccgctacaagtgcgttcagtgcagcaactatgatctttgccagaaatgcgagttggctcacaagcatcctgagcacttgatgctacgcatgccgaccaacaatggacccggtatggtcgatgcctggttcacaggtccaggattgggacgccgcagtggccggcgctccaggggacattgcccgtttcaggagacgaaccaggcagatcctgctggcgaacccgcaagggatagtcgccgtgaacggcgtcaggcccgccgccatgccggagtcttgactcagtttgtcgagatgatgaccaacttgccgctgaacacaacaacggccacggcaccagccgaaccgcagaaaccgaaggctgcagaacaaactgaaagtcctccacaagctgagcccactgttaccgctgaaaaggcagctgaatccgaggccaaaccaactgagccgaagaaggttaacactgatcaaagtgtccctagaaccgaagatccagtgacgactccacgttccactcagccaactactccagtgattaatctggataacatttcgcagattgtgccacccgagtacatgagtgctggcatcgaaatccttaataacttcagcgaaatgttttccaagattatcgataccactgagggcggtgattcgggaatttttgcgccctcaacgactcccagtgctgagaataagaaaccagaagagcagggtcaatccagtggccagtcgggggcatcctcggccaaccagtcagctgttccctctgccgctccatcggctaatcagtctaatgtcccatctgctaaccagtcggccactccatcaatttctggttcgatccctgatgctcagcttgagacagagcccctgaatcctaagccatcggaaaccaccaccgaaacagagcaggaaagacgccgttcagacagcttggatccagagtggcagcttattgacaatgcatactctgcaaacaatagtaacttgatcaatctggacacaaccaatcccactgctgctcctcaggagccggtgcgtgattttggtcagctgggcgaactattgcgtcagcacatgaatgaggaggctcgcgtggagcaggcttcggccaacacccagactgctcaagttgatacggtgagtacatcgacctcgaccacatcggtgaccaccaatagcgtcggcacctccccagcagctcccgacgacaagcgcacggtccccgtctaccacactggtaagtgccgaattaaataactaatcgctttgtattaattatgtctcctaattagatgaaagcatcaataaatcgatccatgccatgatggccatgggtttcagcaacgagggcgcctggctaacccagctcctagagtcggttcagggcaatatctcagctgccttggacgtaatgaacgtatcgcagaaccgcaactaaatattcatattcaatatcgatatatctacaatgtatcttcaatatctatagaacccaatgaaaaagggattttactttatcgtatcagtttactacgtagcttagtttttctgtggtgctagatttatctcgtagccaaaataaatgtgaaaatagatatatgttatgttttaaataatcaacaaaatgttatcgtatatatatgtatgtgtgaaattgcaataaaggcacaaagtaaaatgatttaaaatgcctgctttatacctgatatggttttgtttagtagagtacgattgacagacaacaaaagcctcctccacttagataatgtgtttatacgtatggtataaatcgattctggtttttcagagttcaaatccgcaaagcactcgaattatttcttgagtgatacacaaatccacaatactgtgtttcggaattcgattcgtttcctgtagtattgatattccagtgtgaacactactcgcttgtcgaaagagcctcaaagatcttctctagcttctgctgcatctgatccaataaaatagtctgtcgccaagccggcaacatctcgcacaaatctccggagttcgtaatttgcagtcgtaatggtggcaataaatgtgaaaaatttgaagagcttctggtggtgtgccttccactgtcgccgaccgaatcccgtgttatatccgaacatttgagataccatcagaacgaggaatccggacaatccgaaaaatcgatgaagcattttcaaggcgaagccactgttgatgaaatacagcggaagaccgctcagaacgctacccagaagaagagcacaaccgattatacctgatgggcgaaagatggaggcataaattatcattatatttgggaaaagaaccgacgagaacacaccgtaaaaagcatggttgctcttaaagtgacgaacggtggcattggggtcttcccgtttgcgctccagcttctgccatgtcttgattccgattccgccggctccgaccaggaatgccaacagccccaggacggcgtgcaggcggttgaggttcaatggacccaacgaggactccaaatatgcgctattccggaccagcaatgcttcgcccatgaaaaacacaaactataatgaaatagaagatagatggaacaatgatttaggacgggtaaaaatttcaggagatagtaaaccagtttatatttaggtcttccgggtacagaaaactctcactcgagaaatatatatccttgaaaccattagattatttgttaaccgtggcctcaaactttcactttttcacatatgtttctaaatcttttaatatccgaaatcaaaatacttacgccgattgtgcagtagaaggcatgtccggcggtgtgcaccaatttgagcaccagacacttgtaaacaatggctacggtgatccccgccagaagcacatgcgagatcagtgtgcagaagccaaagtagaggcctccataggaaccttgcaattcggca

SEQ ID NO: 42512 - DNA, 2661 bp, DROSOPHILA
ccgaagtattattaatctttgccaaagaccagctttggcattacaatacaattttggggatagattaactagtgcagcccagcaggcagcaccgtgatttgcaacaatttgagcctcactcattcaagaaccttccagcaactagttcgcctagtatatatacctgctctcacccagctgcacttgtatacacaatcgaacggccgaacaaaaactacgcagtagtcgagagctccaaattaatagaatccgtcacataaattcgccgcaacaagttaaacgagaataaaagcgtcagcatcgatatatatacatacatatattcaaaagtctgtcgaaactacagaatacgttgcgaaaatgccggagaagctgttgaaaatcacctaccagggcgctggaccccagaaaaagataaatgcatacctgcggatgccctcccagaattacaccatattgcgtcgcgaaatcgagctgtatcttttccaggagcgccagttacccaaatgcgacgtaaggaccttctggatcgacgctgataaagatgaaatcgaaatagtcaaccaaaatgactatgagattttcctggccaagtgcgagagcaatatgcacgttcaggtggctccactggcgcccgtagaggagccaaaggccaccaagcaagagggttcttcggccaacgctgaagctccttctgtcgacgatccgagcaatttcaccatccacgacgccgttgaatgcgatggctgcggcttggctcccttgattgggttccgctacaagtgcgttcagtgcagcaactatgatctttgccagaaatgcgagttggctcacaagcatcctgagcacttgatgctacgcatgccgaccaacaatggacccggtatggtcgatgcctggttcacaggtccaggattgggacgccgcagtggccggcgctccaggggacattgcccgtttcaggagacgaaccaggcagatcctgctggcgaacccgcaagggatagtcgccgtgaacggcgtcaggcccgccgccatgccggagtcttgactcagtttgtcgagatgatgaccaacttgccgctgaacacaacaacggccacggcaccagccgaaccgcagaaaccgaaggctgcagaacaaactgaaagtcctccacaagctgagcccactgttaccgctgaaaaggcagctgaatccgaggccaaaccaactgagccgaagaaggttaacactgatcaaagtgtccctagaaccgaagatccagtgacgactccacgttccactcagccaactactccagtgattaatctggataacatttcgcagattgtgccacccgagtacatgagtgctggcatcgaaatccttaataacttcagcgaaatgttttccaagattatcgataccactgagggcggtgattcgggaatttttgcgccctcaacgactcccagtgctgagaataagaaaccagaagagcagggtcaatccagtggccagtcgggggcatcctcggccaaccagtcagctgttccctctgccgctccatcggctaatcagtctaatgtcccatctgctaaccagtcggccactccatcaatttctggttcgatccctgatgctcagcttgagacagagcccctgaatcctaagccatcggaaaccaccaccgaaacagagcaggaaagacgccgttcagacagcttggatccagagtggcagcttattgacaatgcatactctgcaaacaatagtaacttgatcaatctggacacaaccaatcccactgctgctcctcaggagccggtgcgtgattttggtcagctgggcgaactattgcgtcagcacatgaatgaggaggctcgcgtggagcaggcttcggccaacacccagactgctcaagttgatacggtgagtacatcgacctcgaccacatcggtgaccaccaatagcgtcggcacctccccagcagctcccgacgacaagcgcacggtccccgtctaccacactgatgaaagcatcaataaatcgatccatgccatgatggccatgggtttcagcaacgagggcgcctggctaacccagctcctagagtcggttcagggcaatatctcagctgccttggacgtaatgaacgtatcgcagaaccgcaactaaatattcatattcaatatcgatatatctacaatgtatcttcaatatctatagaacccaatgaaaaagggattttactttatcgtatcagtttactacgtagcttagtttttctgtggtgctagatttatctcgtagccaaaataaatgtgaaaatagatatatgttatgttttaaataatcaacaaaatgttatcgtatatatatgtatgtgtgaaattgcaataaaggcacaaagtaaaatgatttaaaatgcctgctttatacctgatatggttttgtttagtagagtacgattgacagacaacaaaagcctcctccacttagataatgtgtttatacgtatggtataaatcgattctggtttttcagagttcaaatccgcaaagcactcgaattatttcttgagtgatacacaaatccacaatactgtgtttcggaattcgattcgtttcctgtagtattgatattccagtgtgaacactactcgcttgtcgaaagagc

SEQ ID NO: 42513 - protein, 599 aa, DROSOPHILA
MPEKLLKITYQGAGPQKKINAYLRMPSQNYTILRREIELYLFQERQLPKCDVRTFWIDADKDEIEIVNQNDYEIFLAKCESNMHVQVAPLAPVEEPKATKQEGSSANAEAPSVDDPSNFTIHDAVECDGCGLAPLIGFRYKCVQCSNYDLCQKCELAHKHPEHLMLRMPTNNGPGMVDAWFTGPGLGRRSGRRSRGHCPFQETNQADPAGEPARDSRRERRQARRHAGVLTQFVEMMTNLPLNTTTATAPAEPQKPKAAEQTESPPQAEPTVTAEKAAESEAKPTEPKKVNTDQSVPRTEDPVTTPRSTQPTTPVINLDNISQIVPPEYMSAGIEILNNFSEMFSKIIDTTEGGDSGIFAPSTTPSAENKKPEEQGQSSGQSGASSANQSAVPSAAPSANQSNVPSANQSATPSISGSIPDAQLETEPLNPKPSETTTETEQERRRSDSLDPEWQLIDNAYSANNSNLINLDTTNPTAAPQEPVRDFGQLGELLRQHMNEEARVEQASANTQTAQVDTVSTSTSTTSVTTNSVGTSPAAPDDKRTVPVYHTDESINKSIHAMMAMGFSNEGAWLTQLLESVQGNISAALDVMNVSQNRN

SEQ ID NO: 42514 - DNA, 8496 bp, DROSOPHILA
cttctatacagtcacgcctatttgttcgccctttattcgtaatattcatataatatattcatttctaaaaatggtgaaattcgaaacattaattttttgcaattttttagcagtaaatccctatttcccatttattagtccaattatgattgaaactggcccgagtgaatactcgaatcaatatttgaaaatatgatgaaaatagaaacattcatctttggtgtttttgaacagtaaattcccataaatccatcctgtattgtattcttttgaacagtatgttcccctaacttccttctaaaatcaaattacgaatgatttttaagctgaaattggtccaagtgaatactcacaaatgtaatatttgtaaatatgataattagaaataatcatctttgatccctttgaccagtaaattcccataaattccttcttaaatcaaattacgaatgatatttcagcggcaactagcccaagtgaatactcacgaatgaatattgatattggagtgccggcgttttttgtggccatgttattattgttaaggttttgtttgcccaactcgcgtcatcgatttcagtgggcgcaccacatacaccgccacacacacacacacacacacacacaccacaacaacacacactctgccagttttatttacttataatttttatcagtttttttttttacgacttgctcgccccactggagctcggcttcgtctgccgggcctggggttttagagtcgctcggtattataacaaatccgtgggccatcgaaccgaaccagtcccagctcggctctgatcccagtcggtcgcagtcgctcagtcgctaaccaaacttccgccagcatcgatcccgcgcattatagccttataatatctgtgctcttatttcccatcctttttgccctcatttgaccaccaatccaatcaaaatgcgtcgcgcagacgcttttgctgtctcgctttgtgtgattttggccttgctgcagacgatggaaccggtaaaagccgaggggtaagtccatataccacaaatactatactatatgatcggatcgattttaaaacacatctacggttagagtattagtagagtcgggttaggaattcgcaaaaatataggcgataatcaaagccagatatctaaaactatagttctttacaaagctggcctataaaacgtattgttcttacttcggttattcggttgataatttgaataaaaactgatggctaaaaattttaaccatttccctaatacgctagtggttggattcccgtctcactcgaacacttaaacacagattactgcaatccaaactatattatctatgtttattacttattaccactattatattcacagtcactgtatggctgtcgtcgaatatttcaattaattaggtatgcatatatgtatacagatagggccgtttttaatgaacatcaaggtaattaagctgttatttatacgcaaaatcacctattagcttaattgtttataccatctggtttgtccttggatttataggagagtttttttacggtttttacaaatcactaacctaataacattttgctctacatttttcaaatagtaatttaacttttagatatataattatgtatatagcaaatgttaaacatcgttccttatcacacctataagattaaacactagacttctgtccacgtagtgacgatgagcacctaaaagggtgaatttggggaaattcaataaaattgaaaatctggtacgatagtccgatcacaactattcactcacttcaaaaatattcagaatttcttttttaaagaggtttagttactccgaactaatatctggtatttaatttttgagttgaaggtgccatcgccactttaatctcaccttgttgaggggtgttttattttcttcatttttgttgagctcaacttatgatgctaattgagtttcactgtaagccattttgaatatggatttttatattttttactcaaacaagaggatcacgtcacatactttgtttgcctcaatggtttcgctgatcaatctttcacacgatcttaaatctgtactttttcctgtcccgccaattattagtaattagaaacgaatatgaaggtgggttatggaacacacttaaaaatgtcataaacttgaagtctaacataaaaggctggaacaaatctaatccaaaaaagttaatgatgttcaggctaacaatattggtgtacgtgatcggggactgtaagtgcgagaaagattgctaatcgcaaaagctggaattatgtaatctctaagccggtttcatacttttcagtagaagatcaggttctgggaatattatccgttatatatatatatacatatatatttcatcatttgctgtcacagatcaaaaaaaccataactcaaaaacctaaaccgaatcttagactgccttttaaagattgggaacattatcaagtcgaggttaatggttttaagtttcatttctgtgtttccctagagattagacaatatacatttatttttgaattcttagagcatggtcaagaatttgatattgataatttgaatattgatagctatagttactatcaagaaatacaatactatatattatacaaatacaatactacaaatatttccaagtggatatgtgtatgtttttttctcttcttggaattttttatggccgaattgttatttgattttattttgtttttcatgacaataatgttgatgttttctttgcttccagcaagtacaccattgtgggtcccggaaccatccactcccaccgtgactacaatgtggccgtggctgtccatcagaccaaggagccagtcaccctgaaagtgggcatcactggaccctcctacaacaaaactgagaccgtggaactagccactgccggtgagttcaagcagatcaccttcaaactgcccccattggaggcgggtgaatataatctgacggcggagggcgtcaagggactggagttcaagaactccaccaagctgaactgggagaatttcaagccatacattaaaatccagaccgataagggaaagtacaagcccggtgatactatcaactatcgtgtgatcttcctggacgagaacctgcggccggataccgctaaggatgaagtggtggtttggtttgaggactccaaaaggaaccgcatcaagcaggagaaacacataaagaccaccggtggcgtctacactggcaaattcgagctctccgagttcgccacattgggctcctggtcccttcatgttcagaatggagatcagcaccacgacggaggtatttactttgggggtcgtaaacaatttggaggatttggtcatcgctggcatcgctcggatgagctcgtcaactttgaggtggagaagtacgtgctgcccaagtactccgtcaaaatggatgccacgcagcaggtttcagtgcgagatggcgagttcaatgtcgtcctgaaggccaagtaagtattaccggaagttttatgctttaggacattcttatatcagcattatcccccagctacacctatggtaagcccgtgaatggtaaagttcttgtcaatgtccatctggactcgacgagcagttgggagaatgtggacggcaagacagtgcaaacggactaccccggacattctgttgttggcaccgccgacatggtcggaggcaaggccaagttgaccatggatctcaaggacttcgccagttatctgccgcacaagacctcttcttcatatgcccagattacggctaccgtggaggaagacttcaccggcgtgaagctcaatgaaacaggcggtgtgcagctgtacccctatcggtatgagatgtcctgcactgactactccagttgcttctccttcaagcccgacaaggaacatgaacttaacttcaagattacatatgtcgacggctcactaattacagacaccaagtctgttgtgaaggtgggttagaaatcttaagagatctgtcactacttataaattcgttttaactctaggccaagttcactgaaggaattcgacgcaattatgctttctatgcctttggaacagatcatcaagaaccggaattgccaacgattgagaagaaaacgtttgtgtttgaaagccatttgaatgcgtctggtgtggcgcctttcaaggtggttcttcccgatttgccggatatcgccaactttactcgttactatagcattgagctggagttcgtcgatgaaaaacgagatctgtacaccacttatccctacagggaaccaaaacagattgaaaatcctagctctgaagaggaaaaggagtggttcagggcagaagttcagaggcccaaggacgtctggaagtgagtacagttgagttgagcaagggttccacgattttaaataaccatatacaatacttctattgcagcctcaagatcgggcaggagtatcaagtaatcctcaactccagtcgtccgctcaaatactttgtgtacaacattgtgggacgtggaaacatattggaaacgaaacgtgtggacctcgcggaaccccaaacgaccgtcaacgtaaccattaagcccactttcctcactactccctatggtcgggtgtacttctactacgtggatgagacaggagagttccgatataccgaggaaacattcagtgtggaggtcgagctgcagaaccagatcgaaatcaaggctcccgcggaagttaaaccgggtgccgacgttgcactggagatcaagacgtcgccaaagtcattcgttggattgttggccgtcgatcagagtgtccttctgctgggcagcaacaacgatttgaacaaggaatccttcaactggcgcctaaatggctatgacacctcaactccctggcagggtggatactcctactaccccggagagcgaactggagtcgtgactatgaccaatgcctatttcttctataatcgcaccgccccagactacaatattcgtacgtataaatttgtcataataataaaccacattaatttgcaattattggaagttacagaaggatttggtggaagctctttcgccatgagaaagactacagtggcacatgatagtcatgtattccattccggtgctggcggaccaactcaggccgtgggattctccgccgaaagtgcgtctgcatctgcagcaccagtagtgcgaaagaatttcgcagagacctggatctttgccgatatcgagagcaccgaggaggaggtgttcaagtgggtaaagaccatacccgatacgatcaccaactgggtggtcaccggcttttcactgcatccccagaagggattaggtgtcaccaatgatcagacaaatatcaagacattccagccgttctttgtctccgttcgattgccatactccgtgaagcgaggtgaggtgatcaatgtaccggcactggtctttaactacctgcccaagacactggacgtggaactgaccctggacaacgaggatcaagagtatgacttcgtggatgcctcgaatgaggttattggtgaccagaagcgtacgcagaacatcagagtgggcgccaacgaagcggcaggagcctcatttttgatccgacccaaggtcattggaaatattttgctgaaattcaaggccatctcaccgctggccggagatgctatacacaagccgctaaaggtagtgcccgaaggaattacccagtaccagaacagggcattctttatcaatcttaaggatacgggtgagtttaagaacaccttcgagctggaagtgccggaggatgtggtccccgactccgagcgtgtggaattcggattggtgggtgatctcttgggaccagtggtcaagaaccttgagaacctgttgcgattgcccagcggttgcggtgagcagaccatgtccaaattggtgcccaactatctggtgagggattatctgaagagcatcaagaaactcacacctgcattggacactcgcatcaagaggaatctgcaggacggataccaacatatgttgcactatcgccacgacgacggcagcttcagttcctttgggcccaccaaatggaggcaggaggatccagtgcgcaatggttccacctggctgacggcctatgtgctgcgctcgtttagcaagatcaaggatataattgacttggatgagcagatcctggccaagggctacgaattcctgttaactcgacaggcagaaaatggtagcttcacggaacacggagagtatttctatagctcccagcgatctctattgacattgaccgcaaattccttgctcgccctgctggaggaggagaaaccgaaccaggctgccattgacaaggcggttgcctatctgagcgccaatactgccgagtccattgagctcctgcccaaatccattgccatttatgccctgcaaaaggccaaggcgccggaagctgccaagcaggtggccagtcttaagtccctggccaaacacgaggacgatcgcacctggtggaccgaggatctggataagctgcgtgcctccaagaactgcggacgctggtggtgttggatctggagtcaggatgtggagatcacatcatatgcgctgctttcccttctggattcagaccaggagacagccgactctgttctgaacaccgttcgctggttgatcgcccagcgtaatggcttcggaggatttgcctccagccaggacacggttgtcggcctcaccgccctcattaagttcgctgagaagtcgggctacgaggcggccaagtgggaggtgaccgtttccaacaagggaaagcgtgaaaagaccgagaagctcaacacatcggaggaaaatgacctgctcctccagacagtcgagttcccacagggcaccaagtcgctggagtttgaagccaagggaactggagctgctatggtccagataagctaccaatacaacttggtggagaaggagccgaagccgagctttaagattcagaccaccgttttgccggaatcgtcgccagccaatttggaactaagcgtctgcgtggactacgtggaggagggcgagtccaaggaatccaacatggccattctggaggtatccctgccgtctggttatactgctgatgaggatagcttcgccgacatccggaacatcgaacgtgtgcgggtaagtttcagaatccttaatacctgtacacttttctcttcaattacctataaattattcgctttgcagttggtggaaaccaagaacggtgactccgtggtggtcatatacttcgagaatctggccaagaacgaagaaaaatgcattcgcatagaggcgtacagaacacatgcggtggccaaccagaagccatcatcggtggtcctctacgattactatgacacgaacaagaaggccaccgaatactactccatcaagtcgaagctctgcgacatttgcgagggtgacgactgcaagagcaagtgctagagtatccaaaccaaaaggaatcattaatactttctatccttacttaaaataaaattgtgattataatgtatatacaaaatgtctcttttactgctttgggttacataagagttatagcgtagtgacgaaacgcatcagtcagtgtgctaatgtccaaatcttaatgtagaaacagtttataaggaccataaaccaattgattgttttatcgtaattagttttcagttagggagttcttcaactaacaagtaaaggaagggactttcagattctgagttctgggatacaaagaatcaatttggattgcacttatttatggagctcgagaaaatgggaatgcttctgagcatcaagctagttgacgaataaaaagccattaggtgatcaaacattgattaagagaacccctaaattaaaaatgattgttaagcgcttattcacttattattcagcttggttaaatcttactaaaacttagatggaggagatcttcattgttaaatgggacactgggtgaaagtctgtgcaacagattagttgttttaccgtaatcgaaaagaatttacttgaagtcacttggagtcgcaacggagttgcaacatcgagataggcgagacagcctgcaaaaatctattatgatcctcatcgaaaccaaaagttgcataagcagataaatgtaaccaaatttgtattgcaaatagaggttaaaacaaggtaagtggctgcacaagaaatgggttataaatttcaaaactctttcaattcttcccgaggaacgtgtttgaaaatcaagacagaattacaaatcgattcgagacaaaaactaagatgtttacctcgctggactcgcacagtaaaagccagtggagttttggccaaattccagacaaactttacgattaatctgactgacaaggatatcccccaaatggaatcaatattgactgcaaaagtaatagcaactgtagaagataacctcaccggtcaaatggtcactggg

SEQ ID NO: 42515 - DNA, 4278 bp, DROSOPHILA
atggaaccggtaaaagccgagggcaagtacaccattgtgggtcccggaaccatccactcccaccgtgactacaatgtggccgtggctgtccatcagaccaaggagccagtcaccctgaaagtgggcatcactggaccctcctacaacaaaactgagaccgtggaactagccactgccggtgagttcaagcagatcaccttcaaactgcccccattggaggcgggtgaatataatctgacggcggagggcgtcaagggactggagttcaagaactccaccaagctgaactgggagaatttcaagccatacattaaaatccagaccgataagggaaagtacaagcccggtgatactatcaactatcgtgtgatcttcctggacgagaacctgcggccggataccgctaaggatgaagtggtggtttggtttgaggactccaaaaggaaccgcatcaagcaggagaaacacataaagaccaccggtggcgtctacactggcaaattcgagctctccgagttcgccacattgggctcctggtcccttcatgttcagaatggagatcagcaccacgacggaggtatttactttgggggtcgtaaacaatttggaggatttggtcatcgctggcatcgctcggatgagctcgtcaactttgaggtggagaagtacgtgctgcccaagtactccgtcaaaatggatgccacgcagcaggtttcagtgcgagatggcgagttcaatgtcgtcctgaaggccaactacacctatggtaagcccgtgaatggtaaagttcttgtcaatgtccatctggactcgacgagcagttgggagaatgtggacggcaagacagtgcaaacggactaccccggacattctgttgttggcaccgccgacatggtcggaggcaaggccaagttgaccatggatctcaaggacttcgccagttatctgccgcacaagacctcttcttcatatgcccagattacggctaccgtggaggaagacttcaccggcgtgaagctcaatgaaacaggcggtgtgcagctgtacccctatcggtatgagatgtcctgcactgactactccaatcatcaagaaccggaattgccaacgattgagaagaaaacgtttgtgtttgaaagccatttgaatgcgtctggtgtggcgcctttcaaggtggttcttcccgatttgccggatatcgccaactttactcgttactatagcattgagctggagttcgtcgatgaaaaacgagatctgtacaccacttatccctacagggaaccaaaacagattgaaaatcctagctctgaagaggaaaaggagtggttcagggcagaagttcagaggcccaaggacgtctggaacctcaagatcgggcaggagtatcaagtaatcctcaactccagtcgtccgctcaaatactttgtgtacaacattgtgggacgtggaaacatattggaaacgaaacgtgtggacctcgcggaaccccaaacgaccgtcaacgtaaccattaagcccactttcctcactactccctatggtcgggtgtacttctactacgtggatgagacaggagagttccgatataccgaggaaacattcagtgtggaggtcgagctgcagaaccagatcgaaatcaaggctcccgcggaagttaaaccgggtgccgacgttgcactggagatcaagacgtcgccaaagtcattcgttggattgttggccgtcgatcagagtgtccttctgctgggcagcaacaacgatttgaacaaggaatccttcaactggcgcctaaatggctatgacacctcaactccctggcagggtggatactcctactaccccggagagcgaactggagtcgtgactatgaccaatgcctatttcttctataatcgcaccgccccagactacaatattcaaggatttggtggaagctctttcgccatgagaaagactacagtggcacatgatagtcatgtattccattccggtgctggcggaccaactcaggccgtgggattctccgccgaaagtgcgtctgcatctgcagcaccagtagtgcgaaagaatttcgcagagacctggatctttgccgatatcgagagcaccgaggaggaggtgttcaagtgggtaaagaccatacccgatacgatcaccaactgggtggtcaccggcttttcactgcatccccagaagggattaggtgtcaccaatgatcagacaaatatcaagacattccagccgttctttgtctccgttcgattgccatactccgtgaagcgaggtgaggtgatcaatgtaccggcactggtctttaactacctgcccaagacactggacgtggaactgaccctggacaacgaggatcaagagtatgacttcgtggatgcctcgaatgaggttattggtgaccagaagcgtacgcagaacatcagagtgggcgccaacgaagcggcaggagcctcatttttgatccgacccaaggtcattggaaatattttgctgaaattcaaggccatctcaccgctggccggagatgctatacacaagccgctaaaggtagtgcccgaaggaattacccagtaccagaacagggcattctttatcaatcttaaggatacgggtgagtttaagaacaccttcgagctggaagtgccggaggatgtggtccccgactccgagcgtgtggaattcggattggtgggtgatctcttgggaccagtggtcaagaaccttgagaacctgttgcgattgcccagcggttgcggtgagcagaccatgtccaaattggtgcccaactatctggtgagggattatctgaagagcatcaagaaactcacacctgcattggacactcgcatcaagaggaatctgcaggacggataccaacatatgttgcactatcgccacgacgacggcagcttcagttcctttgggcccaccaaatggaggcaggaggatccagtgcgcaatggttccacctggctgacggcctatgtgctgcgctcgtttagcaagatcaaggatataattgacttggatgagcagatcctggccaagggctacgaattcctgttaactcgacaggcagaaaatggtagcttcacggaacacggagagtatttctatagctcccagcgatctctattgacattgaccgcaaattccttgctcgccctgctggaggaggagaaaccgaaccaggctgccattgacaaggcggttgcctatctgagcgccaatactgccgagtccattgagctcctgcccaaatccattgccatttatgccctgcaaaaggccaaggcgccggaagctgccaagcaggtggccagtcttaagtccctggccaaacacgaggacgatcgcacctggtggaccgaggatctggataagctgcgtgcctccaagaactgcggacgctggtggtgttggatctggagtcaggatgtggagatcacatcatatgcgctgctttcccttctggattcagaccaggagacagccgactctgttctgaacaccgttcgctggttgatcgcccagcgtaatggcttcggaggatttgcctccagccaggacacggttgtcggcctcaccgccctcattaagttcgctgagaagtcgggctacgaggcggccaagtgggaggtgaccgtttccaacaagggaaagcgtgaaaagaccgagaagctcaacacatcggaggaaaatgacctgctcctccagacagtcgagttcccacagggcaccaagtcgctggagtttgaagccaagggaactggagctgctatggtccagataagctaccaatacaacttggtggagaaggagccgaagccgagctttaagattcagaccaccgttttgccggaatcgtcgccagccaatttggaactaagcgtctgcgtggactacgtggaggagggcgagtccaaggaatccaacatggccattctggaggtatccctgccgtctggttatactgctgatgaggatagcttcgccgacatccggaacatcgaacgtgtgcggttggtggaaaccaagaacggtgactccgtggtggtcatatacttcgagaatctggccaagaacgaagaaaaatgcattcgcatagaggcgtacagaacacatgcggtggccaaccagaagccatcatcggtggtcctctacgattactatgacacgaacaagaaggccaccgaatactactccatcaagtcgaagctctgcgacatttgcgagggtgacgactgcaagagcaagtgctag

SEQ ID NO: 42516 - protein, 1425 aa, DROSOPHILA
MEPVKAEGKYTIVGPGTIHSHRDYNVAVAVHQTKEPVTLKVGITGPSYNKTETVELATAGEFKQITFKLPPLEAGEYNLTAEGVKGLEFKNSTKLNWENFKPYIKIQTDKGKYKPGDTINYRVIFLDENLRPDTAKDEVVVWFEDSKRNRIKQEKHIKTTGGVYTGKFELSEFATLGSWSLHVQNGDQHHDGGIYFGGRKQFGGFGHRWHRSDELVNFEVEKYVLPKYSVKMDATQQVSVRDGEFNVVLKANYTYGKPVNGKVLVNVHLDSTSSWENVDGKTVQTDYPGHSVVGTADMVGGKAKLTMDLKDFASYLPHKTSSSYAQITATVEEDFTGVKLNETGGVQLYPYRYEMSCTDYSNHQEPELPTIEKKTFVFESHLNASGVAPFKVVLPDLPDIANFTRYYSIELEFVDEKRDLYTTYPYREPKQIENPSSEEEKEWFRAEVQRPKDVWNLKIGQEYQVILNSSRPLKYFVYNIVGRGNILETKRVDLAEPQTTVNVTIKPTFLTTPYGRVYFYYVDETGEFRYTEETFSVEVELQNQIEIKAPAEVKPGADVALEIKTSPKSFVGLLAVDQSVLLLGSNNDLNKESFNWRLNGYDTSTPWQGGYSYYPGERTGVVTMTNAYFFYNRTAPDYNIQGFGGSSFAMRKTTVAHDSHVFHSGAGGPTQAVGFSAESASASAAPVVRKNFAETWIFADIESTEEEVFKWVKTIPDTITNWVVTGFSLHPQKGLGVTNDQTNIKTFQPFFVSVRLPYSVKRGEVINVPALVFNYLPKTLDVELTLDNEDQEYDFVDASNEVIGDQKRTQNIRVGANEAAGASFLIRPKVIGNILLKFKAISPLAGDAIHKPLKVVPEGITQYQNRAFFINLKDTGEFKNTFELEVPEDVVPDSERVEFGLVGDLLGPVVKNLENLLRLPSGCGEQTMSKLVPNYLVRDYLKSIKKLTPALDTRIKRNLQDGYQHMLHYRHDDGSFSSFGPTKWRQEDPVRNGSTWLTAYVLRSFSKIKDIIDLDEQILAKGYEFLLTRQAENGSFTEHGEYFYSSQRSLLTLTANSLLALLEEEKPNQAAIDKAVAYLSANTAESIELLPKSIAIYALQKAKAPEAAKQVASLKSLAKHEDDRTWWTEDLDKLRASKNCGRWWCWIWSQDVEITSYALLSLLDSDQETADSVLNTVRWLIAQRNGFGGFASSQDTVVGLTALIKFAEKSGYEAAKWEVTVSNKGKREKTEKLNTSEENDLLLQTVEFPQGTKSLEFEAKGTGAAMVQISYQYNLVEKEPKPSFKIQTTVLPESSPANLELSVCVDYVEEGESKESNMAILEVSLPSGYTADEDSFADIRNIERVRLVETKNGDSVVVIYFENLAKNEEKCIRIEAYRTHAVANQKPSSVVLYDYYDTNKKATEYYSIKSKLCDICEGDDCKSKC

SEQ ID NO: 42517 - DNA, 3406 bp, DROSOPHILA
caatagcgcaattttacgcagcactttagcttactaacccacattgatggctccacaaagcgagcaaaataatttgtctgcctaattgaaataaaataaataaaactaagcagaaaaaatgtcggcaaaaaacaaggcgcagctgtattgtgcgctagtgtgtgtaaaaaggagacggccatagaaaaaaaaaacacatatacacacaggagaatttactgctgcttgcggcgcccacacacacatacacaaaaacactcgcctatttagtacagcaactgcgtaaattcaataaaaatagtcatctggagtaaaaaaacccagtttcctgtcttcatttccctttttccgtgaaggtacacagtcactactgttataatttagcacacacactcgcgcatttatgtatgcatttgggttgctttcatttggatgtttatcacttactttaccacttactttgggatttagctcttcgtttgtcgcacttttttggcctgttttcatgccattttctttttgaaaaactgaaagagtacaattcgttgtgtcgcgtcttaaatgaacaagtgttgccagactttagctggagggagatgacactatcgcgaggcagcataaaaatcagtgctgtaaagcgaaattaaaaaaaatatctgataactttaatattagtttatttgtttactgaattttacattttcttatgtactataaataaaaatcaattcataaatttatttgagaggagtaaaacaagaagaatccacctaaacattacagacttaagttctaaatatcccaaacgttgtttaatttctatttatatttgtaacgattagttagttattagtaataatgaaagaactagtgataaaatccatttgtaatcactgctagaattggcttgaaaatagctagactgacgttaacaatactgttaccagttggcatttcctgatccggcaactccacacgacgccatttcaaaacaaatgcgcggcaacgattttattttaccccgcaacatttagtgagaagtcgcaaaataagtcagattatttgattaaaatgggagcaaaggcaacaaaaatggaaggtgaatatctgccggatacgccgacactaaacaaaatgcgcctggccagcgaaaagcgagaacaaatggaaatgacgacgccgaatcgagagcaaaacaacgctttgctcgatcctcgatcaccaaatggctgccgcacgcctttaaccgtgagtttataggcattaggtattttttgatattactaaccctagtaatgatggctgcgttgtagttcttgcaggcgtcaaaacctcgcgttgaggaggaggagcagcatgtgaccaccagtgaaaatgccttctccatgctgcgaaaacgtttgctcaagggcttctccctgaacgatcctcgctctcctcagctgaatcgcactccactggtcctcgatgaggttcgttcgcttaatatggatgacacattcgccgatctcttcgtggacaccagggtgggtacagcacagagagcagtgcctgcatcaccgccccaagtggatttagaggagagctgcgatagcttcggcacaccgccgtctgctgcacacaacaatatttccctggagattgtttcactgccctatgatcaggaagaaaccttgccttgcgagcaacagctgctgccgtatcaggagccgaatctggagcagggccaggtgaaaatggccacgcccccgccagaacagcagccccatggtgatccccgatcgcccagcctgggcgtcgatcgcacacccatcatcttctgcgacgacgaggaggaggaggcacgcgaggcccagatgctggagcacatcctggaaacactgaccctgaatctcagcactggcagcagcatggcctcctttgtcgctggcgaggagcagctaccagaagtgccgtcgaacaaacatttggagcgagtgcgtttgggtcacaagcgtcgtgtgccaccgcgcaagcccgccagagccaacaagccaaagatctatgttgaccaagaggaggggtccccggtgaccggaggatccattacgcccaagacaaacagtacccccctgtccgcacaaaagcgaactccactcagttgcgttaagaataagccgcatctgcgatcccgttcaatggaaaaggattctaagaagaatcagattccgcccgcgcagagcttcaacgatcaactgcggataatctctggcacagagggattcagcggacccgtttactaacacagcttagtagctactattgccttatgtccatcaaaacccaccaaatcatagtcttttctcacgacacatacttttattactcatcttttaataaatcattttattagtttgcttgccagtacattgtgcacataaattgatggatgcagtttgctcatgagtattattctaacatttggaaaccgggctatttattcctgaagtaacctattaccgataatcagcgacatatagtttgtatatccattgaatctattaagtcttaaacgttgcaagttagtaaaaccgccacacaagctctatttcgttaccaagagtatttactattaggtacgtaacttcattcttgtctagtgtattgcattaactacgctatttgtgaccggaatacgtgatatatcaaaaatacatttgttcaaagcatggtgagccgagaggtccaagctctatcgatactgcagctgcagcctatccagcagaatgtcgatggcctcctggtcgagttcctcgtcgttggccaacaccacgtcgaagccgtcggccagatcatccagatcgcactcggagggaacatcgtctattcctgcggtaaaggtccatccccgtgcagaccgcgtttctggacgggatgttagacgcaaggtgatgactcgttccggcccgtaagtctcccggaaccacctgatgtcgttcttgcgccgcacatcgctgaccagaatgtagggcgtctgctggcgactcagcgcctcctccatggccacgcggcagaagtagccgtagtcctgggcccgcacctcgtcgctccacacaatcatgtcgcgccggtacttctccttgtagggtccatcaccgaggagagcgtccaggtccaactgcagcttgcgagcccattccgacttaatgggctctgagattcgaacgatacacgaccgggagcccaatctggaatggaattggattttatttgtctgaatatttctgcagcaagcagtgcaaatttaacaaattggcaagatttctacgactagctatgcactgcacccacctccgctgcagcctctcggatatgtaatccttgccgcactttcgcttgccgctgatgagtacaattttcatcattt

SEQ ID NO: 42518 - DNA, 1341 bp, DROSOPHILA
cggcaacgattttattttaccccgcaacatttagtgagaagtcgcaaaataagtcagattatttgattaaaatgggagcaaaggcaacaaaaatggaaggtgaatatctgccggatacgccgacactaaacaaaatgcgcctggccagcgaaaagcgagaacaaatggaaatgacgacgccgaatcgagagcaaaacaacgctttgctcgatcctcgatcaccaaatggctgccgcacgcctttaaccttcttgcaggcgtcaaaacctcgcgttgaggaggaggagcagcatgtgaccaccagtgaaaatgccttctccatgctgcgaaaacgtttgctcaagggcttctccctgaacgatcctcgctctcctcagctgaatcgcactccactggtcctcgatgaggttcgttcgcttaatatggatgacacattcgccgatctcttcgtggacaccagggtgggtacagcacagagagcagtgcctgcatcaccgccccaagtggatttagaggagagctgcgatagcttcggcacaccgccgtctgctgcacacaacaatatttccctggagattgtttcactgccctatgatcaggaagaaaccttgccttgcgagcaacagctgctgccgtatcaggagccgaatctggagcagggccaggtgaaaatggccacgcccccgccagaacagcagccccatggtgatccccgatcgcccagcctgggcgtcgatcgcacacccatcatcttctgcgacgacgaggaggaggaggcacgcgaggcccagatgctggagcacatcctggaaacactgaccctgaatctcagcactggcagcagcatggcctcctttgtcgctggcgaggagcagctaccagaagtgccgtcgaacaaacatttggagcgagtgcgtttgggtcacaagcgtcgtgtgccaccgcgcaagcccgccagagccaacaagccaaagatctatgttgaccaagaggaggggtccccggtgaccggaggatccattacgcccaagacaaacagtacccccctgtccgcacaaaagcgaactccactcagttgcgttaagaataagccgcatctgcgatcccgttcaatggaaaaggattctaagaagaatcagattccgcccgcgcagagcttcaacgatcaactgcggataatctctggcacagagggattcagcggacccgtttactaacacagcttagtagctactattgccttatgtccatcaaaacccaccaaatcatagtcttttctcacgacacatacttttattactcatcttttaataaatcattttattagtttgcttgccagta

SEQ ID NO: 42519 - protein, 374 aa, DROSOPHILA
MEGEYLPDTPTLNKMRLASEKREQMEMTTPNREQNNALLDPRSPNGCRTPLTFLQASKPRVEEEEQHVTTSENAFSMLRKRLLKGFSLNDPRSPQLNRTPLVLDEVRSLNMDDTFADLFVDTRVGTAQRAVPASPPQVDLEESCDSFGTPPSAAHNNISLEIVSLPYDQEETLPCEQQLLPYQEPNLEQGQVKMATPPPEQQPHGDPRSPSLGVDRTPIIFCDDEEEEAREAQMLEHILETLTLNLSTGSSMASFVAGEEQLPEVPSNKHLERVRLGHKRRVPPRKPARANKPKIYVDQEEGSPVTGGSITPKTNSTPLSAQKRTPLSCVKNKPHLRSRSMEKDSKKNQIPPAQSFNDQLRIISGTEGFSGPVY

SEQ ID NO: 42520 - DNA, 4182 bp, DROSOPHILA
tggccgtgcccagatctcccttggccaagaacctgatgcccttcgaggagcaggcgatcgtcagggactcgtcgaacatgctcatgtcccggcaaatgcgcgcgaactctgacgacggcaactggatgaagcaggtgtagtcctttttcggaatctccatgtgatcctggtccagattgaggagcttcagctcgtagtccgccgtgcgctccttgccatccgactcgaagctgagcgtaatcttctccggtctgtcaacggccttaatggtgaccgcatcgtcgctattggcgcacttaagcaccttgcccagggatttcagatccaagcccagcgagacattgcgatcgcagtgaaacttttcaaaacaatccgaagccagacttagggccaccagcgaaacgtgggagttgtccatcgattgcagctggaatatagagttgtaaaagctttatttcttatctcaacttttcattttcagtcccaagtctcaatggaactacttaacagcttttatgggaattcgaaacaaaatgacagatggagggttattctcttcacctccagaccattttcactgcagtccagcgttccctgggcgatgatttcctttagtgcatcgacgatcttcttcagcagcaaagtctgactcaaacgcgcctcgagcatttttccaattttcaaaattgacaatcgctgtcccgttaaattcacaattggaaacaaacaaaatgaagccagtcagctgtttcgctgcaagtgtagagatgccggactgctgcggagttaagaacaaagcttgttagattagtttcggttgcggatttaagttcatttgatgtctgatgatgaagctagtgaacatagatcttagaatttgacttaaagctgtaggttaatccttttctatttaagggtatccaattgaaatcacttaatccgactgatctggcagcatctgcaacactggttccggctccagttctagttcgagatccagttccagctcggatccagccatccaatccaatatgtttacgctttatttatttatttgtttatttataaccaactgctgagctccccgatggccgccgcgcaggtggagatgcacgctgctccggcggctccccatgtcgatcgaaatcccagcagcgactggcgacagtggtgtcgcctgtgcgccaaggacgacgtgcaaggcaacttgaatgtgttcctcaagaacgaggattccggcgaggcagcctccatggaactggccaccgccattggcaagtacttctgggtgaatgtgagtgcgctcctcgtggctccttggatttccacaagctaaccagcttatcttgatttctcttgccccatcatcagataactcgaggtgaagagctgccggagacgatatgcagtgagtgcctgtcgctggtcacctcgctggtgaatttctcggaacggattacccgcgtgcagaagctttactgcatcctgcagagcacgcccagccaggagaggccaaatctccacgagctgcgctcgaaatttggtttgctggacgaggagacgcagactgaggtgcactatgtggacaagaagccgaagttggatgaacagctcgagtttctgccagaggagtcgccttacgagctggcaaacccactaacgccagaggaaaagcaggaaagcgtagatcaggagcaggatcagccgacggaggagccagatgagcaggatgccgactacgaaccgaatgaagatcgtgtactaatgagcctctgcgatgtgtatggcattcaggaggataactcttctgctggcagcttggatggctcctcgccgagtaccgaaaaagctggagaggatgcagcagactctgagaaaagacaccagtgcaacgagtgcttgcgaagctacgccacgtccaaaaccctgcagcgccacctgcgccaggatcatggccagactgagcccacaaccgagcagctgcaatgcccggattgccccaagaagtttcgtctacactaccagctggagaggcacatgaaatggcacgtgcccctgcccaagcgcaagcagtacgcctgtagcagttgcgacaagaagttcgccaccagtgcatccgcccagcagcacgagcagtacatgcacctggatgagcggccgcggccggtgatttgcgagcagtgcggtgtgggtgtgcactcgatgagcgcgctcaaggagcacgtcctcaagcacacggactacgcccccttcgagtgcgaggtgtgcaagaagtgctttaagtcggccaatcgtctgaaacaccacaaggagacgcatgatccgcacaagtacatctgccccgaatgcggaatgcagctgaattcgcggaccaccttgaatcgccatcgactggtgcacacggatcagatgcagcacaagtgcgactactgcggccgggagtttaagcgcgccaaggcgctgaagaatcacctcatcctgcacacaggactgaagccttactcctgcgatttttgcgaccgcacctttgccaacggctccaactgccgcacgcacaagaagaagtcgcatcccgaggagctggctgctcaagaagcggcgggcggcggcaggtcgcacaacagaaatatacccaagctggaggcgctcaaggcattgtaggttaaccaaaatcgtacatataatgacaatttctaaatgattccattacaattccgtttgtagcaccaagaacaaggacaatctgtcgccggtggccaccaaacagagtggctgcttcgccttcggcaaaaaaccgaggccagccaccaaggatactccagcttcgaatcccgccgtcatccaagatgctcagcctgaaccagcgcctgatcccggaggggagaacgccacccaagctgataccccagctgcggctatacccacgttagataatatttataaccatatcatgatcgactatcgctgaccccccacttgagttcaccccttcaaatagcacaagtttgaagttttgtttccaaattcgccgtatgttgtgtatttatagctgtttaaagatatagttgagattgttttgcatacactagaatgtgtaagtcgacttaataattaatttaaagtatatgagctaatgtaattagaaagagagcttctacgggaaattaaatattttgcttatgagttaggatctttctatttcgggtacattttattgtttatggttccggaataactcaagtgcgcgagcgggaaagtgggatttgaacgcatccgtggatggcgcatgtgctctgggttccggagtcggaatctgaggcgaagcgaagccacccccatttgaatcctgtcctggtataaaggaatttagttcagttgacagcgtgcgccttctcgtgtcctgctcttgatgaaaacttttgccgaaaaccagtaaatcgaattgaaagccgttgagatgtgtgaaaagcccaagcaaataatccctgaatccaacatgaccaaattgggcagtaaacaaagtgtggaaaaggaagtgtgaagtgcgtccctttactccgacgtgcgagccgaaaaatcaaaaaaatcgatttatcccccaataaaaacaaagtgcactaaatgccccaaaacgaacgatgaacttcaaataaccaaatttgggctgcgaagtgtgaaaagtggattgaaaaccgaaagctttacgaaaaaatagtctttcaattaaatattcagtgaaattagttgagagtgggtgcgaaaatcaaaagagcaggcaaagcagctgacacaagaacctaacaaaagatcaaatcaaaaatacgaagtgtaagtaaaaaaaaatgatcttaaacaaattgttaacgttacgaaaagtaacacttttaagtaagttaaaagttcctgcgcagccctggtccgcgactccacagctgtttctgtgccaccccatccctggtttcggattttcggaatcagttcgctcgcgaaccacacgaaagaacaacaccaacatcgctttggctgcgcgaaattatcaaaaaattattgtttttcgtcactctcagctcgtatttgttgtgcaaagtgttgctatcggtgttccgagtaccagcaaagtgagcgttttcgaattgcaccctgtatatcgagactttttgtcggcgtttttcccacttgttt

SEQ ID NO: 42521 - DNA, 2038 bp, DROSOPHILA
ttccagctcggatccagccatccaatccaatatgtttacgctttatttatttatttgtttatttataaccaactgctgagctccccgatggccgccgcgcaggtggagatgcacgctgctccggcggctccccatgtcgatcgaaatcccagcagcgactggcgacagtggtgtcgcctgtgcgccaaggacgacgtgcaaggcaacttgaatgtgttcctcaagaacgaggattccggcgaggcagcctccatggaactggccaccgccattggcaagtacttctgggtgaatataactcgaggtgaagagctgccggagacgatatgcagtgagtgcctgtcgctggtcacctcgctggtgaatttctcggaacggattacccgcgtgcagaagctttactgcatcctgcagagcacgcccagccaggagaggccaaatctccacgagctgcgctcgaaatttggtttgctggacgaggagacgcagactgaggtgcactatgtggacaagaagccgaagttggatgaacagctcgagtttctgccagaggagtcgccttacgagctggcaaacccactaacgccagaggaaaagcaggaaagcgtagatcaggagcaggatcagccgacggaggagccagatgagcaggatgccgactacgaaccgaatgaagatcgtgtactaatgagcctctgcgatgtgtatggcattcaggaggataactcttctgctggcagcttggatggctcctcgccgagtaccgaaaaagctggagaggatgcagcagactctgagaaaagacaccagtgcaacgagtgcttgcgaagctacgccacgtccaaaaccctgcagcgccacctgcgccaggatcatggccagactgagcccacaaccgagcagctgcaatgcccggattgccccaagaagtttcgtctacactaccagctggagaggcacatgaaatggcacgtgcccctgcccaagcgcaagcagtacgcctgtagcagttgcgacaagaagttcgccaccagtgcatccgcccagcagcacgagcagtacatgcacctggatgagcggccgcggccggtgatttgcgagcagtgcggtgtgggtgtgcactcgatgagcgcgctcaaggagcacgtcctcaagcacacggactacgcccccttcgagtgcgaggtgtgcaagaagtgctttaagtcggccaatcgtctgaaacaccacaaggagacgcatgatccgcacaagtacatctgccccgaatgcggaatgcagctgaattcgcggaccaccttgaatcgccatcgactggtgcacacggatcagatgcagcacaagtgcgactactgcggccgggagtttaagcgcgccaaggcgctgaagaatcacctcatcctgcacacaggactgaagccttactcctgcgatttttgcgaccgcacctttgccaacggctccaactgccgcacgcacaagaagaagtcgcatcccgaggagctggctgctcaagaagcggcgggcggcggcaggtcgcacaacagaaatatacccaagctggaggcgctcaaggcattcaccaagaacaaggacaatctgtcgccggtggccaccaaacagagtggctgcttcgccttcggcaaaaaaccgaggccagccaccaaggatactccagcttcgaatcccgccgtcatccaagatgctcagcctgaaccagcgcctgatcccggaggggagaacgccacccaagctgataccccagctgcggctatacccacgttagataatatttataaccatatcatgatcgactatcgctgaccccccacttgagttcaccccttcaaatagcacaagtttgaagttttgtttccaaattcgccgtatgttgtgtatttatagctgtttaaagatatagttgagattgttttgcatacactagaatgtgtaagtcgacttaataattaatttaaagtatatgagctaatgtaattagaaagagagcttctacgggaaattaaatattttgcttatg

SEQ ID NO: 42522 - protein, 578 aa, DROSOPHILA
MAAAQVEMHAAPAAPHVDRNPSSDWRQWCRLCAKDDVQGNLNVFLKNEDSGEAASMELATAIGKYFWVNITRGEELPETICSECLSLVTSLVNFSERITRVQKLYCILQSTPSQERPNLHELRSKFGLLDEETQTEVHYVDKKPKLDEQLEFLPEESPYELANPLTPEEKQESVDQEQDQPTEEPDEQDADYEPNEDRVLMSLCDVYGIQEDNSSAGSLDGSSPSTEKAGEDAADSEKRHQCNECLRSYATSKTLQRHLRQDHGQTEPTTEQLQCPDCPKKFRLHYQLERHMKWHVPLPKRKQYACSSCDKKFATSASAQQHEQYMHLDERPRPVICEQCGVGVHSMSALKEHVLKHTDYAPFECEVCKKCFKSANRLKHHKETHDPHKYICPECGMQLNSRTTLNRHRLVHTDQMQHKCDYCGREFKRAKALKNHLILHTGLKPYSCDFCDRTFANGSNCRTHKKKSHPEELAAQEAAGGGRSHNRNIPKLEALKAFTKNKDNLSPVATKQSGCFAFGKKPRPATKDTPASNPAVIQDAQPEPAPDPGGENATQADTPAAAIPTLDNIYNHIMIDYR

SEQ ID NO: 42523 - DNA, 4199 bp, DROSOPHILA
agctcggtggataactccgtcaacagctccaccacggagtcactgcaacgcaagttactgtagagattattattttttagttataataagcttattacttgcagagaccttaagcggcccactgaaggatcggagcaacatttccggagacggaaagctgatgaagattgccgagacggacgagctctgcgaggagcagtctgccaacatttccgtggccagcagcacaggaggcggcagcgacaaagagaatcccccgccggttgacgcagaaatgaaacgccgtctgcgcttgctttcggccagtcgaaacagtaccccgcaccatgctaacatcacaccacaatcctcaaatcctctcttgaagcctcagcagttgctggccaaatcgtcaagcggactttccgcccaaatggatgcagattggcgcaaggaattcagcgagctaagagattttgtagaccagcgctgcgagaaggtggagcgcgaattggagtacgttaccttctctaatcagcggctattggctaataagatgaccaactacatggaccagcaggtggaaaacacaagggagatccgggacgccctggctttactacttcaaggagatagcttcatgcgcgagttctcgcgcctacaaaatgaaaacgaaatgttaaaggccaaattgaagttttaccaggagcaggagcaaactgaatcatgcggagagtaaaacgagggggagacatgttaataattaattgaaacattgttattattgtatttaatttattgttattatcaactattagtaacatttttcaaaataggttttggcgtctcatgagttttatgtaaattttaattcgttaatcgatccatttagatattttacaaatgttttagaatatttacctcggtctataaaatgtttttgaattcgttattaatatagtgctgccaaaagtgtaatgcgataagaaagcttcttaaaatgtattttttaaaacccttttcactttctgtactctagctttaagtgatcatttttcggattcgtcatgggcatgtccaccgatatggtcctgttgaagttctcgtagtcgacaatgtagcgctcgttttgggcgtcgtaatggatgatattgacgaaccgctggccccagaaaatctcccttggcagataggacgtcttggcctccgtcatctgcgctgtggcaggcgaagtgcccacaatggacacatacaactcaaattgggcagcattgaagagtttcgctgtggtgaactgagacaacgggctggtctcatcgatgacatggcacaccacatcgggccagagaataatctgctccccattcccctccagcttcagttccacgtgactttttatagtctcaccctcgcgcgtgctgtcagagaaatagataagatgggggttcgtattaattgcttgttttatccagcagcaagtactatctgaatggaaggtcagttcatttatgactttccttatgactgggtcaatatttcaggagtcaagtgtgattaaattgtttctatagcatttataaatattgaaaaaaaaacgttgaagatcaagacaaaataggaaaatatacccaaattaaccgcggattcttaagttctatgattttccctaaaatgcgactgtgactcaccgtttgtccacgatgatgtagactcgtatcttggactcgatggactgctgctcgcggggatcacagacgcggaagagcaaacaaagcctgccgtcgcgataacagatctacgtgagataatcgctaaaggatggatccgaatggttgggtgtactcctctcgcccagtggaggcattttacttaccaccgccttatcgctgaacttcagcttggtcagctgcctcgccggccgtgcggtcttggcatagatcacgctcaccatacagccctcgattagggccgcactcaacatctgcatgacgaacaggaagatcgtctccggacactcctcgctggcgtatttttcgccgaatccgagggtcgtctgtgtttccacagagtatatgatcatggccacccagctgtgcaccccgtagatgcagggatccacgccctcgcccattcgcttgccacttaccggatcgaagatgaagtcaccgtgcgagtaggccaccacgtagcagagggcggcgaagagcagccagctgaggaagtagctgcccaggaacagggtcagcatatacttccactccagttccatctgcgcgattggaaagaaacgacctttatggattaccaatgaatgaaaatacgacccattttaatatctttactgtgtatcccttcaatttagcaagtgaatatgtggttggttaatacgtatttattaatatgtgtgagtattttagtcggtcatggcttgatcaatgtactacaaactatatgctgaacgtgacgcgctcgttttggttaggattagacttcgaaaaatggggactcaggtgcggtggctcattggccagttcatcgagtctgcgctgaatactgggcgttatgctatacacatccgatcgcgattgatcggccctgggtgtagacgttttcctgtgtccgaaccaggatcttaccagcgtggtgaccagatcccgcatgtagcgccatgacttctccggaatgcggcggaacacaacgttctccttgccgttcttttccatcacgcgattaaggctgcgtctcagtccatcggaggaggaagtccgcggtccggatcccaaatctggagtaagctcaatcgtactgcccgcccagtcgtgtgcgtaggggaaactaaacgtgggacttatattattatttatataaacttgtagggtttttataataccagaaaagttcatagaaaataaaggttttcgtttcttagtatccatagtcattataacaactatctgattggtaatttcttttgcctaaactcaactcacttttgctcgctgcgtgtttccaggtgatcgccggctgcttttgaccttctgcgccgtacgaatcccggactctccggatagtaatcggacgcattgaccgtctccttttcggaggaacggagcagtggcttctgctccagtggcttgggcttcaccggcatggaggttgagcgatgcatggttagggaatccgtggcagcagctcccaggggagatgcgtccgattgcatgaccgggattcagctattgccgcctacgtcgacgcggaatcactgacgagagcgtggcctataattgtcggaaatttggggcaatttcactcgaacgcgtagatctgcgttttaattttaattgaattgaattaggctgcagtggcccacggctacgatttatagtgagagcgagagctcaacttgattgcctgaccgcttgacactgactaagtccgcgtccatactatctgccccttgaagatgtgcatttggatttatttattatcttgttcgttgggcatatgacagcggttgtccgccgcccgccgagattagtgcctcgaaatgtgccccaagatcttaagtaaaagtcggacgctatcagtgtatttattttgcgaacgatcaaatattgtcctaagtctggcaaatatttcactttttatacgtcgggagggcagcacaatcttttgcatctgcatctcttgactggaagttgatagtagatagttggtaagatatccggttgcgtttgaatttgccgcccacgtaatcgatcgaggcacttgtgtaagaacattttaaggacagataaggatacaactttaaactctctctggaaacttttataatataattgcatttagtttccttatttgtgatgataacagtcatgttacctaatttctcaagctaaaaataaaatattagcccagattaaaaaagaaaaataaatcttaaagatttgaatagctcagatcacaaccagactggttgggttcaaggctagatctatgtatgtaaaattcgtcgtagaatcaatgtataattcatacagagaagagaatgtcgaatttgaaattcgttttttttttataaaaccagacccagttaaaattgctctttattttaatttcaaaaacttgtaactttttatttaaacagtgggcgcgttgttttgtttgtcattacttttcatacacttttcgtcatgtcacgctcgtatatgtacaaaaga

SEQ ID NO: 42524 - DNA, 1500 bp, DROSOPHILA
atgcaatcggacgcatctcccctgggagctgctgccacggattccctaaccatgcatcgctcaacctccatgccggtgaagcccaagccactggagcagaagccactgctccgttcctccgaaaaggagacggtcaatgcgtccgattactatccggagagtccgggattcgtacggcgcagaaggtcaaaagcagccggcgatcacctggaaacacgcagcgagcaaaatttcccctacgcacacgactgggcgggcagtacgattgagcttactccagatttgggatccggaccgcggacttcctcctccgatggactgagacgcagccttaatcgcgtgatggaaaagaacggcaaggagaacgttgtgttccgccgcattccggagaagtcatggcgctacatgcgggatctggtcaccacgctggtaagatcctggttcggacacaggaaaacgtctacacccagggccgatcaatcgcgatcggatgtgtatagcataacgcccagtattcagcgcagactcgatgaactggccaatgagccaccgcacctgagtccccatttttcgaagtctaatcctaaccaaaacgagcgcatggaactggagtggaagtatatgctgaccctgttcctgggcagctacttcctcagctggctgctcttcgccgccctctgctacgtggtggcctactcgcacggtgacttcatcttcgatccggtaagtggcaagcgaatgggcgagggcgtggatccctgcatctacggggtgcacagctgggtggccatgatcatatactctgtggaaacacagacgaccctcggattcggcgaaaaatacgccagcgaggagtgtccggagacgatcttcctgttcgtcatgcagatgttgagtgcggccctaatcgagggctgtatggtgagcgtgatctatgccaagaccgcacggccggcgaggcagctgaccaagctgaagttcagcgataaggcggtgatctgttatcgcgacggcaggctttgtttgctcttccgcgtctgtgatccccgcgagcagcagtccatcgagtccaagatacgagtctacatcatcgtggacaaacgcacgcgcgagggtgagactataaaaagtcacgtggaactgaagctggaggggaatggggagcagattattctctggcccgatgtggtgtgccatgtcatcgatgagaccagcccgttgtctcagttcaccacagcgaaactcttcaatgctgcccaatttgagttgtatgtgtccattgtgggcacttcgcctgccacagcgcagatgacggaggccaagacgtcctatctgccaagggagattttctggggccagcggttcgtcaatatcatccattacgacgcccaaaacgagcgctacattgtcgactacgagaacttcaacaggaccatatcggtggacatgcccatgacgaatccgaaaaatgatcacttaaagctagagtacagaaagtga

SEQ ID NO: 42525 - protein, 499 aa, DROSOPHILA
MQSDASPLGAAATDSLTMHRSTSMPVKPKPLEQKPLLRSSEKETVNASDYYPESPGFVRRRRSKAAGDHLETRSEQNFPYAHDWAGSTIELTPDLGSGPRTSSSDGLRRSLNRVMEKNGKENVVFRRIPEKSWRYMRDLVTTLVRSWFGHRKTSTPRADQSRSDVYSITPSIQRRLDELANEPPHLSPHFSKSNPNQNERMELEWKYMLTLFLGSYFLSWLLFAALCYVVAYSHGDFIFDPVSGKRMGEGVDPCIYGVHSWVAMIIYSVETQTTLGFGEKYASEECPETIFLFVMQMLSAALIEGCMVSVIYAKTARPARQLTKLKFSDKAVICYRDGRLCLLFRVCDPREQQSIESKIRVYIIVDKRTREGETIKSHVELKLEGNGEQIILWPDVVCHVIDETSPLSQFTTAKLFNAAQFELYVSIVGTSPATAQMTEAKTSYLPREIFWGQRFVNIIHYDAQNERYIVDYENFNRTISVDMPMTNPKNDHLKLEYRK

SEQ ID NO: 42526 - DNA, 4391 bp, DROSOPHILA
cagttggaatcgggccgatcccaggatgaagtcatcgagggttcgcagaggcggcaactgaagattgccggacaaggcggcggctgcatcgcccacggaagtggagggcgttgtcatggtttttgggttattgcggatgtcctgctggctcttgtcctgctgaaagagcttctgataactcggttgacgtaggctccgtgcgacgttgcgaacctcctccacgttgagcagattagaagtcaactgccgaattttcagccgcaagccagtggttgctgattttccccttttcccgggcagcagacgcgttctctcgtcgtcggtgaaccagtcgttattgtcctcttgctcactattatcctccaatcctcggaattccagcgtatattcagattttcacacgactccgtcgtgactttcgtgctgactaacaagcaatgactataggattctggaggtggactcgtgactgctgccgtgagggcactcgacgcactttttaactttaccttttttaatcagtcgctagcaattaaattgtcaaatcaattgacatttcatcaattaaaatattacttgaataataaattaaattttaggccataagtacgtgagtcgcaatagcccatcaccatgagctatcgataggtacaaatggcgttgccacaccaaaaattcaaaaatatattttgaacttaaatttggtttttcctttgatattcagtaaacttacgagaagcccatattttagaaaagcacttgtttggtgttttaaagtaatatctgtataactatattttttatgatcaactgtcccgaacttgtgtatttgaacgttctcactttaaatgattatttatatcttcaatctaaactcaaattcaaattgaattcaagctctctgtcaaataacaagaatgtgcctctattattcgttaaatagacggaagtataagtacagctaacataacaacgcatcttaaataaaaagaactaaattgtggttcacggaaattattctggaaacgatttttactgatgtgtgaatgtttgagaaacgggttggttgatggtgttgggcagatcagagaatcaacctaaacattgttaaacaattattaatattaatgttcatgattaaattaggaatagtttctctatttatcctccgacttggacgttgactacgactacttaaaacttggttcaagttttggtaatgcgttgctgctggtaacacgatgatgctttcatttggtaggtggtgcttggttacgcttccagatcgttaacgaacagcacctcgcggttcttgagtcctacggcctgaagggttttggtcagcgtctccttggctgtgcctgtttccccagcggcatccaagttcgctttcgagaagagcacgcgcttcgggaaattcgttgtgatctcgaactcatccggcgaatcgggatggcagaagagatagtgataaacgtcctgcaataacatcaaatcatcaatcccaaattagcagtttaaatttgtgtaacttacaagcaccgaatccgtctggttaaatcggcgctctaggcgtgttccactgggcagcttgaatacaactgcaatggcgccgacagcatccgctgccggctcggatggcaccaatgtggccagctcgatcttttgccgggcaatctcctccttgcgaagctcgacatcgcgtcgagcttgttccacagcctcctccgcctgccggacggcatcccgctccctttgccgctgacgctccttctcctcgtccgcaagcaaactctgctcgtatgcctcgtcctgctgtcttcttaaagtctgtgtaaaattccgctctaagcgatctgcacgcgcttgactcagccacacctcgttggcgttcgtcaccgactggaggcgacggagcagctcttcgggcgtgcaatccccctcgaaacgtccgacgatcatcatgcgatttgctcgaaggctgatcatcaccatcgttgggtagctgcgcaccgttatcgactgcatcacccggtagccctccggcgtggctacgtcgcatccccataacagggtgtgtgtgttaatgtagtcaatgaccgatctcgccgacagtgtgttgcggcagaaggattccacatctgggttcttggcgggatccttgtgcaggtaaacgattagaaaacgcagctcctgcttagcatcgttaagggcctgggcatatgtgccctgatagaagaccgggtgctcgggatacctttcgtagtattccctaataaacttcatcacatcccccagtggatctgtcaccaagcgggcttcgtttcctccgcccaggttcacaaacgcactgacgatgctcgtcagcgtggagtagaagtactgaaacacgaagttaatcacatatccaatgatgccggtgaagctgcggggaacggggccactgggcacccggctaaccgtccttccgccaggcatgttggcggaaaacacctgctgcaggaagcgatcgttaaggacagcgggcgctcggacatctgtagaggcggcgaacatggtcggacgcccctcgcggatatttagctgctcctggaaggccacctgcatatgtagatatgaaaaagggtaaataagctggtatttagtatagcagggcgcccaacgcaaaattgtaaaaaacaaatttaaaaagaatttagaataaaatgattactatctttagtcgtcagataatatatatgtacaaaacttgttggtagtagtattcttgcagccaccactgtatgcaagactgcaagactacgtgaccctgttattttgacattcactgtgtgggcatataaacatatgcatacctcgagatcccattggtgtctgattaggacgtcgcggcagacgttcatatcctcgatgccggtgagatcctggaactggaggaccttctccgtctgttcgttggtcagtccatcagcttccatctttcctgcagttgaaggcctccgttcccagttgttatcgttgttgtttgcttttacgcagtgcgtgcgtgtgtgtgcttgtgtgggtgccaatggcccgtgactgtctccctggtgttgtttttgttgtaagctggcctttgtccagtggctcagccgctgcggcgggggacgggggatgagtagcgtggtcactaaatgcttctactggtcgccaggagtcatttcaacgcacgccaaattgccgcactacaacgtctttaacatttctcggcaatttatttctttttcgcaggtgattgcttgctcttcttcttgcctttctgccaatgatccgatgaatttggttgtgaatgactagtgtgaccgcgcaggccgacgcgttctcactgcgaaatccagcggcaaacaaacaatttgtgttcgctttttaaaaaattatttttattatttatttgatctctatgcctggcgtggtaaaacacagaaaaagattaaaagcaatattgatatataattcaaaggtgttagataaggacaatgtgtagtggaatcagcatatttgtctaacatcacttggaaaatcgacggacgagctttggaattttcaggtaataaagcagcgggcacattcttaaatcagtccgaacaaaagcactcaaatttgaattgtgtaaatatctgaagaaataaatcaaaatgcatgttatttccacgtctaaaaaaaccgtgctctccgacttcgcggatctggagacaaagtctgagtatgtgcaccagaacgcagagcccacggactttcagttcaacggccaacgccgggtcttcgtggaggtggataaaatggcgggcttggccgtgatgcgaataaaggagaaggatggcaagagtaagagagaggtgcggatccccaaatcccacgtatgtaattaacttcccatttcacagcgcccgagattcaacgagtccgtaagctcaccatcgacaatgccttctgtgtggcgtgcgccaagcaatccctggaagagatcgctgtgggtcagagcggttgtgttaagctatacaactttcggacggcacagctcatccatcgttttccggcggacccgcaaaggagtactgtcctctacatggactacaacaacacggacgagtatatagccgccgtgcgcgatggcggggacatcagtatcttgggtaccaagaccaaacagaagaccaacaccttcaccatagatggcgagtaagttaaaggcttgcttgttaaaggattgcattgatctttcgctatcctgttaatatcagctctactcttgtgcgctttcatccgagcaaacgctttcatctgtcgatcgcttcctataaaggagccgtgactgtctatgatgtgcagggaatgcgaaagatttttca

SEQ ID NO: 42527 - DNA, 2080 bp, DROSOPHILA
tttgtttgccgctggatttcgcagtgagaacgcgtcggcctgcgcggtcacactagtcattcacaaccaaattcatcggatcattggcagaaaggcaagaagaagagcaagcaatcacctgcgaaaaagaaataaattgccgagaaatgttaaagacgttgtagtgcggcaatttggcgtgcgttgaaatgactcctggcgaccagtagaagcatttagtgaccacgctactcatcccccgtcccccgccgcagcggctgagccactggacaaaggccagcttacaacaaaaacaacaccagggagacagtcacgggccattggcacccacacaagcacacacacgcacgcactgcgtaaaagcaaacaacaacgataacaactgggaacggaggccttcaactgcaggaaagatggaagctgatggactgaccaacgaacagacggagaaggtcctccagttccaggatctcaccggcatcgaggatatgaacgtctgccgcgacgtcctaatcagacaccaatgggatctcgaggtggccttccaggagcagctaaatatccgcgaggggcgtccgaccatgttcgccgcctctacagatgtccgagcgcccgctgtccttaacgatcgcttcctgcagcaggtgttttccgccaacatgcctggcggaaggacggttagccgggtgcccagtggccccgttccccgcagcttcaccggcatcattggatatgtgattaacttcgtgtttcagtacttctactccacgctgacgagcatcgtcagtgcgtttgtgaacctgggcggaggaaacgaagcccgcttggtgacagatccactgggggatgtgatgaagtttattagggaatactacgaaaggtatcccgagcacccggtcttctatcagggcacatatgcccaggcccttaacgatgctaagcaggagctgcgttttctaatcgtttacctgcacaaggatcccgccaagaacccagatgtggaatccttctgccgcaacacactgtcggcgagatcggtcattgactacattaacacacacaccctgttatggggatgcgacgtagccacgccggagggctaccgggtgatgcagtcgataacggtgcgcagctacccaacgatggtgatgatcagccttcgagcaaatcgcatgatgatcgtcggacgtttcgagggggattgcacgcccgaagagctgctccgtcgcctccagtcggtgacgaacgccaacgaggtgtggctgagtcaagcgcgtgcagatcgcttagagcggaattttacacagactttaagaagacagcaggacgaggcatacgagcagagtttgcttgcggacgaggagaaggagcgtcagcggcaaagggagcgggatgccgtccggcaggcggaggaggctgtggaacaagctcgacgcgatgtcgagcttcgcaaggaggagattgcccggcaaaagatcgagctggccacattggtgccatccgagccggcagcggatgctgtcggcgccattgcagttgtattcaagctgcccagtggaacacgcctagagcgccgatttaaccagacggattcggtgcttgacgtttatcactatctcttctgccatcccgattcgccggatgagttcgagatcacaacgaatttcccgaagcgcgtgctcttctcgaaagcgaacttggatgccgctggggaaacaggcacagccaaggagacgctgaccaaaacccttcaggccgtaggactcaagaaccgcgaggtgctgttcgttaacgatctggaagcgtaaccaagcaccacctaccaaatgaaagcatcatcgtgttaccagcagcaacgcattaccaaaacttgaaccaagttttaagtagtcgtagtcaacgtccaagtcggaggataaatagagaaactattcctaatttaatcatgaacattaatattaataattgtttaacaatgtttaggttgattctctgatctgcccaacaccatcaaccaacccgtttctcaaacattcacacatcagtaaaaatcgtttccagaataatttccgtgaaccac

SEQ ID NO: 42528 - protein, 464 aa, DROSOPHILA
MEADGLTNEQTEKVLQFQDLTGIEDMNVCRDVLIRHQWDLEVAFQEQLNIREGRPTMFAASTDVRAPAVLNDRFLQQVFSANMPGGRTVSRVPSGPVPRSFTGIIGYVINFVFQYFYSTLTSIVSAFVNLGGGNEARLVTDPLGDVMKFIREYYERYPEHPVFYQGTYAQALNDAKQELRFLIVYLHKDPAKNPDVESFCRNTLSARSVIDYINTHTLLWGCDVATPEGYRVMQSITVRSYPTMVMISLRANRMMIVGRFEGDCTPEELLRRLQSVTNANEVWLSQARADRLERNFTQTLRRQQDEAYEQSLLADEEKERQRQRERDAVRQAEEAVEQARRDVELRKEEIARQKIELATLVPSEPAADAVGAIAVVFKLPSGTRLERRFNQTDSVLDVYHYLFCHPDSPDEFEITTNFPKRVLFSKANLDAAGETGTAKETLTKTLQAVGLKNREVLFVNDLEA

SEQ ID NO: 42529 - DNA, 3106 bp, DROSOPHILA
acagcagacggaagaacgggaggcgttgcagtcaatatacgagggcgacacgaacttcaaggaaatagatagcgtcacatttcagtacaaagtaagccacatggataaaaaaaagcacacaaatatgataatttgtaatataataaatgaaattttagtatggcgaagaggataactacaagtcgttcttggtcgagctcaagtggggcgaaaattaccccgatgaggcgccagcgatcaacatgaacgcgttttacaataggaatctgtaagtggatcgttattccttgggaaattggagcaggtttagctctaaagactacgctttcctatttaacagactgccagctgtcaaggaagggatccaaacggctctgagtacggaagcggaccaatggctgggctgtggcatgacctataccctgttcgaatgccttaaggacaacctggagcaattgaccgcagagcaacccgaatctgcacccacggtggcgttagtggatgatggcgtgggtgctctaaagatctccgatcccaatgccgatgcggagtccaagaaaaaggagcccaagaaggagcacctgactaaggcgcaaaagcgccggcagtgggagagaaccgatcacaaaggagaccgggaacgtggctgggattgggtggacctcgtcaagcatttatcgcagacgggtgggaaaaacgatgattctctcactgccgccgaaattgcagcgtccaacgctccagctctccaccccctgaacaactaaaatgcctaccaactaaaaataggagtaataacatcgaggaaaccttaaattgaaatcaaaagccaatactattttatgtgatagaataaacgcgagtaactgcatgggcggctatcataaagtctatatcttgtttacgctactaactatcaaaggtttcaacttttgatttgggtgagaggattggcccttataagataacattatctttagaggagcaacacagcgaaattcctgggaaaactttattgacatttgtaatatttgcgttacatgatggctgcataaaatcatagtttaatacaaaagtaaaaatcaaaatcgattacaataccgggatttgctttgcaaggatcaacattgacaaggataactagcgataaaaacgatcattccaactgtgtcaaactggtcagtctaattaaagacgccttcggcccggacatttaaggcatccagcaaggagcccatgggcgtggagggagcaaagctctcgatgctgttggtcagcttgttcttgatgtttcgcagtcgcaaggaggcgtggatgaaggtcagcgaaataggtagcaacacggtgaaaatcgtcaaaagcactgcgctcagcagatgcagaagaagataacctccgagcagagctccagccagtatgtaccatttctgttgggcattctgctctgctgcattggcatttccaccagtcagacgactggcgatgaagttcttcttcgactttccgctgaagaactgccagataacgcctatgatcaaagcctgcaccagcagaccagtaataatctttgaaggattgaagaaaatcatcaaaacgtagatggtaatgaagagcaaaaagtagtttgtttggtaatagagcaggttcttcaccacccgattgccccacttctcaaaatccttgagattgggcagttggaatcgggccgatcccaggatgaagtcatcgagggttcgcagaggcggcaactgaagattgccggacaaggcggcggctgcatcgcccacggaagtggagggcgttgtcatggtttttgggttattgcggatgtcctgctggctcttgtcctgctgaaagagcttctgataactcggttgacgtaggctccgtgcgacgttgcgaacctcctccacgttgagcagattagaagtcaactgccgaattttcagccgcaagccagtggttgctgattttccccttttcccgggcagcagacgcgttctctcgtcgtcggtgaaccagtcgttattgtcctcttgctcactattatcctccaatcctcggaattccagcgtatattcagattttcacacgactccgtcgtgactttcgtgctgactaacaagcaatgactataggattctggaggtggactcgtgactgctgccgtgagggcactcgacgcactttttaactttaccttttttaatcagtcgctagcaattaaattgtcaaatcaattgacatttcatcaattaaaatattacttgaataataaattaaattttaggccataagtacgtgagtcgcaatagcccatcaccatgagctatcgataggtacaaatggcgttgccacaccaaaaattcaaaaatatattttgaacttaaatttggtttttcctttgatattcagtaaacttacgagaagcccatattttagaaaagcacttgtttggtgttttaaagtaatatctgtataactatattttttatgatcaactgtcccgaacttgtgtatttgaacgttctcactttaaatgattatttatatcttcaatctaaactcaaattcaaattgaattcaagctctctgtcaaataacaagaatgtgcctctattattcgttaaatagacggaagtataagtacagctaacataacaacgcatcttaaataaaaagaactaaattgtggttcacggaaattattctggaaacgatttttactgatgtgtgaatgtttgagaaacgggttggttgatggtgttgggcagatcagagaatcaacctaaacattgttaaacaattattaatattaatgttcatgattaaattaggaatagtttctctatttatcctccgacttggacgttgactacgactacttaaaacttggttcaagttttggtaatgcgttgctgctggtaacacgatgatgctttcatttggtaggtggtgcttggttacgcttccagatcgttaacgaacagcacctcgcggttcttgagtcctacggcctgaagggttttggtcagcgtctccttggctgtgcctgtttccccagcggcatccaagttcgctttcgagaagagcacgcgcttcggga

SEQ ID NO: 42530 - DNA, 1106 bp, DROSOPHILA
tcacgacggagtcgtgtgaaaatctgaatatacgctggaattccgaggattggaggataatagtgagcaagaggacaataacgactggttcaccgacgacgagagaacgcgtctgctgcccgggaaaaggggaaaatcagcaaccactggcttgcggctgaaaattcggcagttgacttctaatctgctcaacgtggaggaggttcgcaacgtcgcacggagcctacgtcaaccgagttatcagaagctctttcagcaggacaagagccagcaggacatccgcaataacccaaaaaccatgacaacgccctccacttccgtgggcgatgcagccgccgccttgtccggcaatcttcagttgccgcctctgcgaaccctcgatgacttcatcctgggatcggcccgattccaactgcccaatctcaaggattttgagaagtggggcaatcgggtggtgaagaacctgctctattaccaaacaaactactttttgctcttcattaccatctacgttttgatgattttcttcaatccttcaaagattattactggtctgctggtgcaggctttgatcataggcgttatctggcagttcttcagcggaaagtcgaagaagaacttcatcgccagtcgtctgactggtggaaatgccaatgcagcagagcagaatgcccaacagaaatggtacatactggctggagctctgctcggaggttatcttcttctgcatctgctgagcgcagtgcttttgacgattttcaccgtgttgctacctatttcgctgaccttcatccacgcctccttgcgactgcgaaacatcaagaacaagctgaccaacagcatcgagagctttgctccctccacgcccatgggctccttgctggatgccttaaatgtccgggccgaaggcgtctttaattagactgaccagtttgacacagttggaatgatcgtttttatcgctagttatccttgtcaatgttgatccttgcaaagcaaatcccggtattgtaatcgattttgatttttacttttgtattaaactatgattttatgcagccatcatgtaacgcaaatattacaaatgtcaataaagttttcccagg

SEQ ID NO: 42531 - protein, 207 aa, DROSOPHILA
MTTPSTSVGDAAAALSGNLQLPPLRTLDDFILGSARFQLPNLKDFEKWGNRVVKNLLYYQTNYFLLFITIYVLMIFFNPSKIITGLLVQALIIGVIWQFFSGKSKKNFIASRLTGGNANAAEQNAQQKWYILAGALLGGYLLLHLLSAVLLTIFTVLLPISLTFIHASLRLRNIKNKLTNSIESFAPSTPMGSLLDALNVRAEGVFN

SEQ ID NO: 42532 - DNA, 3443 bp, DROSOPHILA
ccaataaaaaatctttatcaatttgcgtgtgtgttgttaaaaatgtgtcctgggttgttcgataaaatgcatgaaaggttcgttggatttgtataaaaaggtacttaatctgtgtgggatcattaaatacggttacgggtgtaaatatatacgcgtttaactacgatatatgtgtacctggctacatggcttggcttattatcgtacagcaggaagcactaagcggccgaaaacaacttcaatgtgtataaatatgcttgctggctaatctaaaatatatgtaaacatatttatgtgcgtaattgtgcactttttctatatactattgggctaacaacagttgccttaacttgttaaaatttcgttcaactgctgagcaaccacaaaatattttgattgagcttattcgagcaaccaaacaagtggaccgggatggggtcatccatattcaggaccacgtaggcacgtgagaatgtgacaataaaggtaggagcactccgaacagctccaagctatttacattacaacaataacgtaaagtaaacgaaacaacaatgggccggtttgggttaattctcgttgattaatttgcaaatgtaggttcggaaagtaatctttgggcatattattagtttttaattaggcaaggacttgggttctatcatcttgtaataccttattttcgttgtatcacattaaacgattgcgtacgttcaataatcttttagaaaatggattatattacttatattcccacaatatgcatgccaatatcaagtgtatattgcgttcttgaattgtttaaaaatatttggcacatttttctctttcgaatacgtaaaatttgatatgacttttcgtgttatcccaccacacaaagggcgttgattcaagattacttttcgcttctacgacttttaagttgctttgaatttgtacaaaattaacccatcccaaggcgggtaacaatataaaaaatttgctgctcggacctaaacttttaaagatgttcgatctgatgtcgcggtttgagcaaaaccaccaccgctgttatgttatcctgggaatcccgctccttggcagcctctatcagcagtttgggaatgtcgtccaacttcattgtggtatccgctagggaatcgtaaacggtttcgattatgagcgactcgggcacatgatcccacaggccatcggtgcctagtacgagaaagtcgtgagcctcatttaactgcacatccacgaagtccggctctgcgatcactgcctcaaggctgtagtcgccaatggagcgggccacgttaagaatgccatttacacgccactgcccctgggcgtggagcactgttccaccagctgtttctattctcttgcgctcatccggattctctggcttgtgcggtttcaccagctgcagttgagtccgcttgcccacgagaagggccttggaatcgcccacccaagcgatataaagctgatcctttgtgatcaaggcacacacgctggttgtgccgctggtgatcttcttctgggtgaaacgctcgtcggccagcaaaaatgccgactcgaaggcattgcgataaaagtctggggagaatgcagcaggatctggatttgctttaagctgatcggctagcagttgtgggagttggctggttgcataggtggcggataaagagccagagtgaccatcaaagacgccaaaaaaacgggtggtcttgtccagcagctcgtacatttcaccaaatcgatccaggcaaacacagcgatcctccattttgcggggtttgttctttacagcggcagatgtgtgcaggggttctttctgctggtggcactcgcagttttccggcgccgcctcatcagcgaagtccttgaggcgatccacctccgagttgtcggtgagttttaggatgtacttctcaaactcactggccacgaacttctgcagcttgagaagatcgtactgcggcggaccctccacggtgacttcacactccttggcaaagcacagatcctgctccagctgctgtgtgcttcgatggagtagcttaatccggaactgcgccggacatcctcgagtctccagttgtttccaaatagctgagaccaattcggcatgacgctcctcgccggacactttgtatgtctcattggccgtacgagttacacaactccggctgaccacctcctcgcttacggctgctgccttctccgccgtgctgaccagaaatcgcttgaattccatcaggtgcgcacattccgatgcgggaatcgcatctgacgacatacttgtcgtgggtcgcgtgtgcctcagttcctgtttccgctcctagtgacgccgcgcgatcatgagcttatcaatgctaattgttgctcaacgatgattcacgcgcgcactgtgcattttatgatttttttttatgttgttattgtttgcgttcttctatgttattctgctgcgaactgaactgtactggctcgataactttgctatgcctatcgaaatagatgcgtgatattcccacctacgaagattgtttacccttcatcttcggtttcatctattacgcttcatttctctttttatttattttttaattttgattgaaaacctttaactgcatttggaaacataaaaaaaacttcagaagtattttaaatgaaataatagaatatatttataaacataattttaatcaagcctttacaataaataacaaaaacacctatttagcctttttaaggcttcgcatgcggacccagtggagacaagctataactgatttgagatagaacggccacacatccaccggtggccagctgattgttactgttgcttttgtttttgttacaaattttgatttttgtcttgtttaacaaaaaatgataaaatcttgaacagtaaagataatccacacaatttactatgagcacgccactggaacagcagacggaagaacgggaggcgttgcagtcaatatacgagggcgacacgaacttcaaggaaatagatagcgtcacatttcagtacaaagtaagccacatggataaaaaaaagcacacaaatatgataatttgtaatataataaatgaaattttagtatggcgaagaggataactacaagtcgttcttggtcgagctcaagtggggcgaaaattaccccgatgaggcgccagcgatcaacatgaacgcgttttacaataggaatctgtaagtggatcgttattccttgggaaattggagcaggtttagctctaaagactacgctttcctatttaacagactgccagctgtcaaggaagggatccaaacggctctgagtacggaagcggaccaatggctgggctgtggcatgacctataccctgttcgaatgccttaaggacaacctggagcaattgaccgcagagcaacccgaatctgcacccacggtggcgttagtg

SEQ ID NO: 42533 - DNA, 1443 bp, DROSOPHILA
aagaacgcaaacaataacaacataaaaaaaaatcataaaatgcacagtgcgcgcgtgaatcatcgttgagcaacaattagcattgataagctcatgatcgcgcggcgtcactaggagcggaaacaggaactgaggcacacgcgacccacgacaagtatgtcgtcagatgcgattcccgcatcggaatgtgcgcacctgatggaattcaagcgatttctggtcagcacggcggagaaggcagcagccgtaagcgaggaggtggtcagccggagttgtgtaactcgtacggccaatgagacatacaaagtgtccggcgaggagcgtcatgccgaattggtctcagctatttggaaacaactggagactcgaggatgtccggcgcagttccggattaagctactccatcgaagcacacagcagctggagcaggatctgtgctttgccaaggagtgtgaagtcaccgtggagggtccgccgcagtacgatcttctcaagctgcagaagttcgtggccagtgagtttgagaagtacatcctaaaactcaccgacaactcggaggtggatcgcctcaaggacttcgctgatgaggcggcgccggaaaactgcgagtgccaccagcagaaagaacccctgcacacatctgccgctgtaaagaacaaaccccgcaaaatggaggatcgctgtgtttgcctggatcgatttggtgaaatgtacgagctgctggacaagaccacccgtttttttggcgtctttgatggtcactctggctctttatccgccacctatgcaaccagccaactcccacaactgctagccgatcagcttaaagcaaatccagatcctgctgcattctccccagacttttatcgcaatgccttcgagtcggcatttttgctggccgacgagcgtttcacccagaagaagatcaccagcggcacaaccagcgtgtgtgccttgatcacaaaggatcagctttatatcgcttgggtgggcgattccaaggcccttctcgtgggcaagcggactcaactgcagctggtgaaaccgcacaagccagagaatccggatgagcgcaagagaatagaaacagctggtggaacagtgctccacgcccaggggcagtggcgtgtaaatggcattcttaacgtggcccgctccattggcgactacagccttgaggcagtgatcgcagagccggacttcgtggatgtgcagttaaatgaggctcacgactttctcgtactaggcaccgatggcctgtgggatcatgtgcccgagtcgctcataatcgaaaccgtttacgattccctagcggataccacaatgaagttggacgacattcccaaactgctgatagaggctgccaaggagcgggattcccaggataacataacagcggtggtggttttgctcaaaccgcgacatcagatcgaacatctttaa

SEQ ID NO: 42534 - protein, 428 aa, DROSOPHILA
MSSDAIPASECAHLMEFKRFLVSTAEKAAAVSEEVVSRSCVTRTANETYKVSGEERHAELVSAIWKQLETRGCPAQFRIKLLHRSTQQLEQDLCFAKECEVTVEGPPQYDLLKLQKFVASEFEKYILKLTDNSEVDRLKDFADEAAPENCECHQQKEPLHTSAAVKNKPRKMEDRCVCLDRFGEMYELLDKTTRFFGVFDGHSGSLSATYATSQLPQLLADQLKANPDPAAFSPDFYRNAFESAFLLADERFTQKKITSGTTSVCALITKDQLYIAWVGDSKALLVGKRTQLQLVKPHKPENPDERKRIETAGGTVLHAQGQWRVNGILNVARSIGDYSLEAVIAEPDFVDVQLNEAHDFLVLGTDGLWDHVPESLIIETVYDSLADTTMKLDDIPKLLIEAAKERDSQDNITAVVVLLKPRHQIEHL

SEQ ID NO: 42535 - DNA, 6496 bp, DROSOPHILA
cgacgaggacaacggcgtagaacctggtagccaggatgcccagatagtggagcctaagaagcgagctgtgagaaatccccgaccgcgactcactgtggaaacacttcgaggtcctcgtggcatccagaccatcgaagattattttaaggacatcaaattcaagggcaagggttacgagaaaaccgatctcgacgaggtgcttcgccgcctgcagcactggggccatcgtatgtatcccacctacacctttgacgatgtgcttaacaatatcgaacggctgggcaagaagaaacccctccaagtgcacatggcgcgatatcgactcggtcagctggagcagatgcgcgcccacgaagcggaggccctggaggaggcgcaggatgagcaacaggaaggtgccggcgatgaaccctttgatgagttcgacgccctgctaggtgaacagattgccatgtccaggctggcgcctcccagcccgcagcagtggaaaatgtctactgcttccagtaacagcacgctggctactccgtcattctcccgcggcaatgctgtaatgtccacgccgtactccggtgtaaatgcgaccttcgacagaagtggagcttctgtggctccggccttcgatcggaatggagctccgttggcatcgatggacatcagcgactatggtcagccgctgcctccctcacagcctcccacgccggcggctaagaaattatccaacgaacagatggccaggattgcggaaaaccgcaggctggcgcaggagcgacttaaggccaagcagcagcaggagagcggaagtaaaagttagtgtatatttatgatataaaaacgcatatttttataattttcaaaggataatttataaaaataaatgaataagctacgttgaaagttaatgcgcggtacttaatatctaaattgatttttctgtacttcgatctttgatgaatatcactttaaatatacccttaatcgtattaaaaccactcgcattagtgttacacatgtatctttattcaaacgttttagtcggagaccgagaataataagttaggattcgggtgtaaaaaactatatggagtgctggagtatttacaaagatgaatggtcatgatggtgagggttcgtgtagaaaatactttacaagtctttaaagactagtcgggatactattagggtactggtgtttagtgggacttggcccatcctaagtgctaaatctgagggcgactctgggcagcgattcgaacagacccttggctccctccaacagagcagctacgatcttgacaagcactacatcttgattcgaagtgctttgtgactggccatcctgatctttgggatctgatcgttccttaatggcctcgcggatcacgtgcaataatctctgatacagaaacgattgcctgtaaatgggcttggagagactcaagtgatcatccttcagcagatagaagtccccgaaatctatcttagaggactcttcggtgacaatgcgcagggggaacttgaacgaggtcaacatggtaggggatccttcagctacactgaccacctttacatggcgcagtagcgtgtgcaagcaccccataaagcggcggtgcatctccagcagcttcggcgagttctcttccatctctttgacctcgattgatggagacaggatcatctgcatgtgctgcttccacttggcaattggtgagccccggtgtggggttcccaaaaatacaatgcctttagtgttcttggtcagctgttggaccttcggctcttgggagtccagggattttagcagtattagcttggtcagcaggccgcccatggaatgtcctatccacacgatcggacgatcgttgcccacatccgacgctgaaatcctgtcgagcagtgtgttggctctcacatcaatgtgaccctgacccttttcacacggacagtatttggtaaaattggcagaccactctgtgactgctgatgtgtaatctatgcccagaattctggaatctggataatcatctggcagccactccatgggccagcagttggtgtactcctcacttgtgtcctggttccgccattcgcttccgcacacactaaattttccttcgcactcctcgttggcattaagaggaacatcgggatggaccacttcccaatccgagtccaactcggcttcgtttctcagtgtctccacgaactccttggtggcagcatcgctaatgttcagacgctgttcctccacttttttgctagctttcaagacaggatctagagttggaagtaaattgtgaattagtcaaaaacaaacggtaatataagtactcttatttacctttgattgtttctgtcttttggttgccattgacatttttgaccgcctcgccgggttttagtttgcctccactgagtctcttctgctcacccaccagaaatacgtcgtctgtttcgctggtatagaaggcgttttttccgtagagacccagctcagtgggctttctatctcgctgacgccaggtgataaaaacacctcccagcaatccatggacgaaaacaatgtctgcctttggcttcctgcgggtgcgaactcgtggatgcaggggatagacatttggcggatacgtgcactggttcggatcgtcgtgatccagattggccatagttttagccgagatcacctgcaggcggagatctgggcattgttgccactcggccagggcgcccacccatccggacgtaaagaaatgttccacggcatcgggcaccagggacatattggccaacactttgcacaaagtcgataaggtctcgttgtcgtcgttgaatatttttcgtagctccatgagatgcacgaggcctccgtccctcataagcctggcggagacctcgggatcctttgtaatatggtgcaggaatgaaatgatttcttttagtaagtccgtgtcggctgtggaaaggactattgtctgctcctgggtcaagtattcgtgaatgtcctcctgcaggaaaacaagattgatttagtatcatgcaaaatgtggttattaagttcagcttacaatgggatcctgttcgggaaagtatttgctgaagaagtggtcaatgcaggccatgggtcgcagccgggccagcatcacgtgaagttccgagaggagcatcttgggattcttaatgcacccacgtcggggaacgggcataaaccatcgcgtgtcggcattgcaacgggccaaggagacagccgtgcgggcatcgcagatttgggccagatgacggaaatcccagtccttcaagtgatccatgcagatgagctgctggaccgccttgaggcgttccggctggctgccagtttgggcgatattgagcagacgccaggccaccgagtgcttagccgccttccaccatttcccaatcgggttgatgatcacgctgatccacttcttctcgtcctcctctttctgcttcaactttcgcatggactcgcggtagatgtggtatttgatgtagatgtactcggcacgccgtttgtccggctccggcgatttcttgtccacatattgggaaaggaaccggcggacctggggcgactcgtacagcaagaaaccagcactgaaaaaaatgtaatgctatatattttaaatattctgttatgatgtacgatagtcttttacttgtttttttattcaacaaataagtttttaaaattttcataaaaacatttcaactttaataaatcttcgaatcaataattttgaaagtgaacccatttgatttaagttcttgatttcttatcactcttagctttcgtttgaatgtttttattttttctagattattttgaccttaaataacaacaacacctttagctgccaactatttgttattgagataaacgtgagataaacaacaacaaaagtgaatccaaagactcgtttgtttatttttaaaaagtgggcacgtcacctccgattgcaaaaacaactacctaattatcccattcttcgtatttgaaaacacgcgccaagtgcaaaattacaaaacaaacaataagaatagcactattatcacttctgataagcagaactataaattcgcggggggcactaatattaaaaactgcgcatttcaatggcgccaagcaagttttggtatctgttttttttcagtgtttcctttttttgtgggggccttgaacagctgcgaacgcacacgctgaagaagaagaagtagaggcgagccaaaaacaataacaaacttcaccagcttgctatctcacttttacaaaatcgtatgttatgttttgatcgtgtttcgtcgagaaaaaaaagagtctgtataatgaacagcatgattatgaccacgaaaataccctttgaaacttaaaaatactctttatgaaaataggttttgtcagctctaactggtcttgaatctagtaaaatgtctgataaatgatggttatttgctatagtgaaatgagatcaatttattactgtaattttaagatcaagtgcaattctaaatcaaaatcctatcaacatattatcaacatccattttaagtcaccccaccgaaaacccttttgcttgaaaccaattttccgctaatgcctgattattaaccgcgccatttgttgtaaacaaatgacgtcacagctgcgacaacacccatttagtatagggaatgcggaaaacaagatctgtttttgttgttgtttactcgatatatgcatatagtatgcacagatcgtacgactgatcggtgcaatgtggcgccatgtaaaatggggcaaaaataaaatgaaaacgtgtgcagacgagccccctaaatcgtagtaagccctgtaaaagttgtgagtcatcgggatgtttgtatttaaattcaccgcacacaaggaaaattttttatacgaaattatagtctttttagtaggtaaattttataagatttgtacattgattagttaaaaacactagtccatactttgctcgcgaattattacatttttaaatcaaaaatggaagagcatgtaataaaagggagctactttttattttctgtgtactgcgacctgtagcagctgcttgggaaatgggtttgttgtggttttctcggttgacatggcgtgaattacttacgcagtaataaggccaactcctccaaggcccaataacttcggatgacggcgcagcttgatcttgagatcctccaatgacattgcctgctttctgatggttttgtttcaagtgtttctttgtttttcagtgtagcactaggcacacacactaacgggattcactctgcagtcgactgccaaaagtttgctcagtttttcacactttaaatttagacgattgtatcacacacactggcccatgcaaatgatagcactagggactgtttagactttgtagctgtcactgggactgcttatagtttgttttgttgcttgcttttgcttgtctgttgagctcttattgctggcgaatttatcaggactttcgtttttataaactagccgttggtgtgaccgtgcgcgcctgtcagctgttgccattcgcagcgagaccattcagctgacggaaaacagatgtgggtggtgtaaagcccatgggcaggtgttggtgacgtttctggggggtcgagttagaacgaattattttcactagaatattttcatttttctaaactgcttaaataaactgtccatttcacgcaacgctgacaaactgtaattttgcagcgtttaaatcaaatatttagtatgaccgaatccggcttgatgcaaataattcaccacctccagcattcaccgcgaaacgcacccactgcacagctgactgataacacaatcggaaggggagaacttcattttggggtatatttattttgggccacaattagttgctagcatttgattgaagtagctccagctccattggcttgtttgtaaaatgccctagagttcgctttccaacgccgcgttcattgattcgttcgagttcagttgcgctagtcgctagttcgatggctttacgcggaatccccgcctgagatagacagccaatctaactaactaagaagcgctggttgtgggtgctagtggagccaggtgggtggtgctttactgctggagtctctgaaagccagacaacccagccagtcccggataggccataagtcataatttccagacggcgcacagctaccaaagagccaggcacgcacagcaaagatgaaaatccattttcgggaacagtacggaagaaagggggaggaaatcctctatgtgacgccagcaggtgagcaaatcgatcaaaccaacaagccaaaaaccttgcaggcgaaaattcagtagccatacagcagcagctataggcactaagaaacttaggaaacaccattggtactgttcaagcttcaatttctattaattattaatcttgtttattattattattatttttgtttggaattatggcgttttacttgc

SEQ ID NO: 42536 - DNA, 2843 bp, DROSOPHILA
ataaattcgccagcaataagagctcaacagacaagcaaaagcaagcaacaaaacaaactataagcagtcccagtgacagctacaaagtctaaacagtccctagtgctatcatttgcatgggccagtgtgtgtgatacaatcgtctaaatttaaagtgtgaaaaactgagcaaacttttggcagtcgactgcagagtgaatcccgttagtgtgtgtgcctagtgctacactgaaaaacaaagaaacacttgaaacaaaaccatcagaaagcaggcaatgtcattggaggatctcaagatcaagctgcgccgtcatccgaagttattgggccttggaggagttggccttattactgctgctggtttcttgctgtacgagtcgccccaggtccgccggttcctttcccaatatgtggacaagaaatcgccggagccggacaaacggcgtgccgagtacatctacatcaaataccacatctaccgcgagtccatgcgaaagttgaagcagaaagaggaggacgagaagaagtggatcagcgtgatcatcaacccgattgggaaatggtggaaggcggctaagcactcggtggcctggcgtctgctcaatatcgcccaaactggcagccagccggaacgcctcaaggcggtccagcagctcatctgcatggatcacttgaaggactgggatttccgtcatctggcccaaatctgcgatgcccgcacggctgtctccttggcccgttgcaatgccgacacgcgatggtttatgcccgttccccgacgtgggtgcattaagaatcccaagatgctcctctcggaacttcacgtgatgctggcccggctgcgacccatggcctgcattgaccacttcttcagcaaatactttcccgaacaggatcccattgaggacattcacgaatacttgacccaggagcagacaatagtcctttccacagccgacacggacttactaaaagaaatcatttcattcctgcaccatattacaaaggatcccgaggtctccgccaggcttatgagggacggaggcctcgtgcatctcatggagctacgaaaaatattcaacgacgacaacgagaccttatcgactttgtgcaaagtgttggccaatatgtccctggtgcccgatgccgtggaacatttctttacgtccggatgggtgggcgccctggccgagtggcaacaatgcccagatctccgcctgcaggtgatctcggctaaaactatggccaatctggatcacgacgatccgaaccagtgcacgtatccgccaaatgtctatcccctgcatccacgagttcgcacccgcaggaagccaaaggcagacattgttttcgtccatggattgctgggaggtgtttttatcacctggcgtcagcgagatagaaagcccactgagctgggtctctacggaaaaaacgccttctataccagcgaaacagacgacgtatttctggtgggtgagcagaagagactcagtggaggcaaactaaaacccggcgaggcggtcaaaaatgtcaatggcaaccaaaagacagaaacaatcaaagatcctgtcttgaaagctagcaaaaaagtggaggaacagcgtctgaacattagcgatgctgccaccaaggagttcgtggagacactgagaaacgaagccgagttggactcggattgggaagtggtccatcccgatgttcctcttaatgccaacgaggagtgcgaaggaaaatttagtgtgtgcggaagcgaatggcggaaccaggacacaagtgaggagtacaccaactgctggcccatggagtggctgccagatgattatccagattccagaattctgggcatagattacacatcagcagtcacagagtggtctgccaattttaccaaatactgtccgtgtgaaaagggtcagggtcacattgatgtgagagccaacacactgctcgacaggatttcagcgtcggatgtgggcaacgatcgtccgatcgtgtggataggacattccatgggcggcctgctgaccaagctaatactgctaaaatccctggactcccaagagccgaaggtccaacagctgaccaagaacactaaaggcattgtatttttgggaaccccacaccggggctcaccaattgccaagtggaagcagcacatgcagatgatcctgtctccatcaatcgaggtcaaagagatggaagagaactcgccgaagctgctggagatgcaccgccgctttatggggtgcttgcacacgctactgcgccatgtaaaggtggtcagtgtagctgaaggatcccctaccatgttgacctcgttcaagttccccctgcgcattgtcaccgaagagtcctctaagatagatttcggggacttctatctgctgaaggatgatcacttgagtctctccaagcccatttacaggcaatcgtttctgtatcagagattattgcacgtgatccgcgaggccattaaggaacgatcagatcccaaagatcaggatggccagtcacaaagcacttcgaatcaagatgtagtgcttgtcaagatcgtagctgctctgttggagggagccaagggtctgttcgaatcgctgcccagagtcgccctcagatttagcacttaggatgggccaagtcccactaaacaccagtaccctaatagtatcccgactagtctttaaagacttgtaaagtattttctacacgaaccctcaccatcatgaccattcatctttgtaaatactccagcactccatatagttttttacacccgaatcctaacttattattctcggtctccgactaaaacgtttgaataaagatacatgtgtaacact

SEQ ID NO: 42537 - protein, 784 aa, DROSOPHILA
MSLEDLKIKLRRHPKLLGLGGVGLITAAGFLLYESPQVRRFLSQYVDKKSPEPDKRRAEYIYIKYHIYRESMRKLKQKEEDEKKWISVIINPIGKWWKAAKHSVAWRLLNIAQTGSQPERLKAVQQLICMDHLKDWDFRHLAQICDARTAVSLARCNADTRWFMPVPRRGCIKNPKMLLSELHVMLARLRPMACIDHFFSKYFPEQDPIEDIHEYLTQEQTIVLSTADTDLLKEIISFLHHITKDPEVSARLMRDGGLVHLMELRKIFNDDNETLSTLCKVLANMSLVPDAVEHFFTSGWVGALAEWQQCPDLRLQVISAKTMANLDHDDPNQCTYPPNVYPLHPRVRTRRKPKADIVFVHGLLGGVFITWRQRDRKPTELGLYGKNAFYTSETDDVFLVGEQKRLSGGKLKPGEAVKNVNGNQKTETIKDPVLKASKKVEEQRLNISDAATKEFVETLRNEAELDSDWEVVHPDVPLNANEECEGKFSVCGSEWRNQDTSEEYTNCWPMEWLPDDYPDSRILGIDYTSAVTEWSANFTKYCPCEKGQGHIDVRANTLLDRISASDVGNDRPIVWIGHSMGGLLTKLILLKSLDSQEPKVQQLTKNTKGIVFLGTPHRGSPIAKWKQHMQMILSPSIEVKEMEENSPKLLEMHRRFMGCLHTLLRHVKVVSVAEGSPTMLTSFKFPLRIVTEESSKIDFGDFYLLKDDHLSLSKPIYRQSFLYQRLLHVIREAIKERSDPKDQDGQSQSTSNQDVVLVKIVAALLEGAKGLFESLPRVALRFST

SEQ ID NO: 42538 - DNA, 5524 bp, DROSOPHILA
gatacaacataaaacaagtttaatgaagttaataaaataaaacaatagatccaatgtataatttgattactcgaagcagacaaccactcgcactcaatttttacacaatcaaatcctaaaaaaaaagacaaattatcagagatatacctgagtaactctttgcaacacacacgttgtctgcattcgagaatcgacagatataacagtataaacaaagacaaaaaaaatggttataagggctaaagaaaaaaaatatttaaaaatataagtctacgaatttcattgtttttctccaaaaaaatgcccaatataacttatgtgaatatctttcgtgttcttatcactttagtgcgggcgattttaaaggtgataaagctgagatgagttaaccaatctaactaagcgactggtttgaattacatgctgtgtgggactaagtaatttacgtacattggaaacaagcaagggtgaaactcttttcaattgcaagacgttaactaaaaactaatcatttccagaccaggcgacgaacatttggattcatttacatctaatataagatcgaattatttatatttcaaggaaataaatatgataacaatttaatagaaaaatgtttgaataggacagctcaatttacttgccttttaagatctctcatcgcataagaaacgacaaaactttgacataaatttatagattctataacaaagaatttctaatgttccagaattcagcgttccgttcattttattacacaaataaaaacggacagttgaggaaccatatatacaataaacatcgtctgctctggattatttgacttctagacgatctgtggtaatcgttactgttaactctggtgctttcacgttaagcttaagaaataattcatgatttaaaactgaaaatcattagtatgtcaaacgcaacgacttcccccaaccgacagtcttctgcttagctccagtatcagatcccccaggcgtttcctggctaacgattcttctggcgcttgcgtcgcttgggaaacacgtaggaggagtgattttcttgatgcctcgcctcggcagcagtggtgggtatttttttgctagccaacgttgccaccggctcagccagtgccttggacctggctatggaggttggcgcttcgattgcatccacccaaggcacaccgaaatcatcccgcgcctccatgttgaccacgttttcgccgaatgcctgaactgtcacctcgttgacgaattggatggcctctatgtcctcgggcagcgggtagaaagtggaggcgcgcagaggatccagcgcaaccaacacctcgtcttggttccgtcgcatccgaagctgttcaagccgtatctgctccttcatataacgtgcatccctacactttcgatcgacctcatccttcacatatttctggtgccggcgctcgaaggtcgcatcgctcagtaattctgtgtcaattttatccgaactgggtggcactgggacatcccgccacttgggtatctccagactagggttatccgccagcagctcgtcggcctcctccaggaagaactcgttgtcacagtggaactcctgatcctcccacgttctcgtgctgtacggaaacgtggcagtgcggaatctggactgcagttttcccgatctcgccgttgccttgctgtacgtgtggggtgaacagttgtttagcgtttttcggatagtcgaagtggtgctgctaacactgctattagattgaggtgtcagaggagttgctatttgttcagctgccttggatttcgattttgctgcagatatttcctggtccattgaggatgtaaccgcatgctgtggcgttgagccaggcgttggtgtcgttgacggcgtaggcgctggggttattgttgttgaggatactggtgcactgggtggtggatatattagatttgtggcgactctctctcttattttcttgagcgtaacctgtgacgaatgactctggcttaggagctccttttttaaatgttccgccagttttcttctaactgtttccacatctatttcttgatctgggctctgagacgtttccgacgtggtctttttatcattgaccaacatacttttacttttaatggttttcgtctcgggcgtcgaaactggatcaacgttcttttgtttccgaatatcagacggggcggaggagccggttctcatgtcaggatgcatttcatactgcctgatcttaacctgcaaacgctgcgtttttacaggatccgtttgcgtcttggtggactgatggttggctattactttttgagcgggagcgtcttttatgtcagcggtgtttgccttgggcaacgtgctttctcgagaggatgttttcgtaacctttggggctaccgctttcggaaggtgcttaggtgcatcctctggttgccttttcagagtttccttctgtaccttacgaacatcctcttgtggttccacgcgaacatccagctgcccatcctgcctctgttcgtctttgggctggtccttcggttttaagtccggcttgggaacttccaactgattctttattgcattatgatcaacgatggcatcttcctgatgcggctgctgcttgggtacttctggggactcggggactgattcatgttccttatcctttttcttaaaagccacccacttcgggagaatcggcgcttctaatgcatctaccattggctcaggctttagttgcaacaacttttcagttatccgattctgatttccttctttccttatctctgcctgtgtcgaagacttctgctggtgattgggagttgaatgggccgaaggcgcacaggtcttctcctccgtcgggtccaattccaaaaggtaattctgaaagagtaaaggattgctcgatatattcttttaattaaataataacattaaacatacctgattctgccagagctcttcctcagttctggcgtttacatccgcatcgctatgcatccacggataatcatcctcttcactgtcatcgtctttatcactattctcgtcatcttcgtcgtcctcgtcatcatcctcctcgatatggccgttggcatccacggactgtccatgctcctccatatcaaccagctcttcggtgaccacttccatttcaattgattccaaagcatcatgaaagatatcgcctccaacgacttcctcggtgtgcacttcttgcatatgcagatgatcttcctcagcgaccagttggtcctcttcctgagatatttgctccttatgtgcctccatctcgtgctcctctgctacttccgtttgctcgtggatgtggtgctcgaagtcctgattcatgcgctggagaataaacgtgctcacctttttaccgttgaattcaccgcggcctttgctctccgagcgtttgctggctggctgattcgttaccgctccagcgtgatggtccagagcgggagactccttcatgttgatacccctgggaagtgcattcgcgaattgaggctgcgcatctatcgtttgtgtgccctgttcccgctcccgaaacacagtttgcgtctcagcatgacaacgtatcaacttctgctgcggggcagcaggtggcagtgggggatcatcgtcgtcgtcgtcattgtcgttccttcgctggttctttcgccgcagctgtttgcatagttcctggttggcggcctccaactgagcaacggcctgctttaattcctcattctgcgccttcaccacgctcatcttagcgctttggtcgtccagctccttgtccttggccgctatgctgtccgtctgctcctgcatcaggtttaagttcaacataaccatgcgcctcaggttgttgttctccgagatgagcttgaccatatcggcgccggcacacacggttccgccggaggaaggaggagccatggctccgccaccatgctcagctggcagcgaatgcaaaagctttcggtagttgttattacccccgccatgtcctccacgaccattgccatattgctggcgctcatagatcttcccgggatgctgatgaagatgctgcgtctgattgggatggccgtgcagattcctttggcggccacgcgacggtatgtggggatagggcgattccaagtagttggcccgctttttgggcggccacttgaatcgcttgtccatggcagtcgaattgaatcccgtgccgtcggtcctacgatctcataattctccaaatgtttttgttttgttttggttttgtttgcgtcgcttggggtgcacacaatctcttcagctgatacgccgtacaatgcgtagaatcccgattacaatttcgcaccacactaaattttccttgctcgccctcgcaaaagaaccgctcttttcttggccagaatctaatggatttatcgttttaaacgtggcgttcttatcgcacgtggtgaccgcatttaggcagcagtttttcggttcgtttttgaacgttctttcaccgctttttccacaattgtcctcacaatgtaaagtcgccccgaaaatgctcttaaaagtatggcgttttgctggcgttgccacttttcgccaaagcgcagagttgattgggggcatagagatggcaatttgctgcgatgcacgagctgagcacgacagtcacgaagtgaaaatattttcacgaaactgtactttgttgcacataatagctaatagctaagttaacacgagccgacgaactagtacagttggcttagtgtatgaaacataatatcaaagtgctgagacagcattgggccggagtctttgttagctttaagaatcattttaagtttcagcttaaatttgcagttaccagaataaagagcggcagctcgtcaactccgactaaatgtcgttaaacacatttttatttcttactctgccagaccacaaggatagcagttaaaagaggacagtttctctcaacgtaaataataatcttccgttgctccccggataattattttcaatttttatgtggtatgagtaattggaatgagaaaatagatgaaaaagaaactagctagctaataatgtattgattttattttattttttttggtaattttattacattaccaactccttttaaatatttcactaaatttaaataactacaatctttggatgaattatccttccttgtataatggtataaatataatagaataacaaaaactcgtgacgccaatgtgtcgcttagtgataaaaaaaacgtgtcacgctgccatctcttatgtctgctgccaccaatgcaaaagccgggttggctgtacaaattacctttagtgccacccactaatgaaaatatgtctaagcaaatcaaaatagcctttgggaaagaccaaatagttatgtaatcggaaaattaaaagaacaaagagctgttcagttggcagccccctgtgacttatgcaagcgtcgcctgtgaatggtagatagagaagaagaacaaaaattggcgccaaaattttgttagattgtttatttggtattt

SEQ ID NO: 42539 - DNA, 3464 bp, DROSOPHILA
gcgactttacattgtgaggacaattgtggaaaaagcggtgaaagaacgttcaaaaacgaaccgaaaaactgctgcctaaatgcggtcaccacgtgcgataagaacgccacgtttaaaacgataaatccattagattctggccaagaaaagagcggttcttttgcgagggcgagcaaggaaaatttagtgtggtgcgaaattgtaatcgggattctacgcattgtacggcgtatcagctgaagagattgtgtgcaccccaagcgacgcaaacaaaaccaaaacaaaacaaaaacatttggagaattatgagatcgtaggaccgacggcacgggattcaattcgactgccatggacaagcgattcaagtggccgcccaaaaagcgggccaactacttggaatcgccctatccccacataccgtcgcgtggccgccaaaggaatctgcacggccatcccaatcagacgcagcatcttcatcagcatcccgggaagatctatgagcgccagcaatatggcaatggtcgtggaggacatggcgggggtaataacaactaccgaaagcttttgcattcgctgccagctgagcatggtggcggagccatggctcctccttcctccggcggaaccgtgtgtgccggcgccgatatggtcaagctcatctcggagaacaacaacctgaggcgcatggttatgttgaacttaaacctgatgcaggagcagacggacagcatagcggccaaggacaaggagctggacgaccaaagcgctaagatgagcgtggtgaaggcgcagaatgaggaattaaagcaggccgttgctcagttggaggccgccaaccaggaactatgcaaacagctgcggcgaaagaaccagcgaaggaacgacaatgacgacgacgacgatgatcccccactgccacctgctgccccgcagcagaagttgatacgttgtcatgctgagacgcaaactgtgtttcgggagcgggaacagggcacacaaacgatagatgcgcagcctcaattcgcgaatgcacttcccaggggtatcaacatgaaggagtctcccgctctggaccatcacgctggagcggtaacgaatcagccagccagcaaacgctcggagagcaaaggccgcggtgaattcaacggtaaaaaggtgagcacgtttattctccagcgcatgaatcaggacttcgagcaccacatccacgagcaaacggaagtagcagaggagcacgagatggaggcacataaggagcaaatatctcaggaagaggaccaactggtcgctgaggaagatcatctgcatatgcaagaagtgcacaccgaggaagtcgttggaggcgatatctttcatgatgctttggaatcaattgaaatggaagtggtcaccgaagagctggttgatatggaggagcatggacagtccgtggatgccaacggccatatcgaggaggatgatgacgaggacgacgaagatgacgagaatagtgataaagacgatgacagtgaagaggatgattatccgtggatgcatagcgatgcggatgtaaacgccagaactgaggaagagctctggcagaatcagaattaccttttggaattggacccgacggaggagaagacctgtgcgccttcggcccattcaactcccaatcaccagcagaagtcttcgacacaggcagagataaggaaagaaggaaatcagaatcggataactgaaaagttgttgcaactaaagcctgagccaatggtagatgcattagaagcgccgattctcccgaagtgggtggcttttaagaaaaaggataaggaacatgaatcagtccccgagtccccagaagtacccaagcagcagccgcatcaggaagatgccatcgttgatcataatgcaataaagaatcagttggaagttcccaagccggacttaaaaccgaaggaccagcccaaagacgaacagaggcaggatgggcagctggatgttcgcgtggaaccacaagaggatgttcgtaaggtacagaaggaaactctgaaaaggcaaccagaggatgcacctaagcaccttccgaaagcggtagccccaaaggttacgaaaacatcctctcgagaaagcacgttgcccaaggcaaacaccgctgacataaaagacgctcccgctcaaaaagtaatagccaaccatcagtccaccaagacgcaaacggatcctgtaaaaacgcagcgtttgcaggttaagatcaggcagtatgaaatgcatcctgacatgagaaccggctcctccgccccgtctgatattcggaaacaaaagaacgttgatccagtttcgacgcccgagacgaaaaccattaaaagtaaaagtatgttggtcaatgataaaaagaccacgtcggaaacgtctcagagcccagatcaagaaatagatgtggaaacagttagaagaaaactggcggaacatttaaaaaaggagctcctaagccagagtcattcgtcacaggttacgctcaagaaaataagagagagagtcgccacaaatctaatatatccaccacccagtgcaccagtatcctcaacaacaataaccccagcgcctacgccgtcaacgacaccaacgcctggctcaacgccacagcatgcggttacatcctcaatggaccaggaaatatctgcagcaaaatcgaaatccaaggcagctgaacaaatagcaactcctctgacacctcaatctaatagcagtgttagcagcaccacttcgactatccgaaaaacgctaaacaactgttcaccccacacgtacagcaaggcaacggcgagatcgggaaaactgcagtccagattccgcactgccacgtttccgtacagcacgagaacgtgggaggatcaggagttccactgtgacaacgagttcttcctggaggaggccgacgagctgctggcggataaccctagtctggagatacccaagtggcgggatgtcccagtgccacccagttcggataaaattgacacagaattactgagcgatgcgaccttcgagcgccggcaccagaaatatgtgaaggatgaggtcgatcgaaagtgtagggatgcacgttatatgaaggagcagatacggcttgaacagcttcggatgcgacggaaccaagacgaggtgttggttgcgctggatcctctgcgcgcctccactttctacccgctgcccgaggacatagaggccatccaattcgtcaacgaggtgacagttcaggcattcggcgaaaacgtggtcaacatggaggcgcgggatgatttcggtgtgccttgggtggatgcaatcgaagcgccaacctccatagccaggtccaaggcactggctgagccggtggcaacgttggctagcaaaaaaatacccaccactgctgccgaggcgaggcatcaagaaaatcactcctcctacgtgtttcccaagcgacgcaagcgccagaagaatcg

SEQ ID NO: 42540 - protein, 1038 aa, DROSOPHILA
MDKRFKWPPKKRANYLESPYPHIPSRGRQRNLHGHPNQTQHLHQHPGKIYERQQYGNGRGGHGGGNNNYRKLLHSLPAEHGGGAMAPPSSGGTVCAGADMVKLISENNNLRRMVMLNLNLMQEQTDSIAAKDKELDDQSAKMSVVKAQNEELKQAVAQLEAANQELCKQLRRKNQRRNDNDDDDDDPPLPPAAPQQKLIRCHAETQTVFREREQGTQTIDAQPQFANALPRGINMKESPALDHHAGAVTNQPASKRSESKGRGEFNGKKVSTFILQRMNQDFEHHIHEQTEVAEEHEMEAHKEQISQEEDQLVAEEDHLHMQEVHTEEVVGGDIFHDALESIEMEVVTEELVDMEEHGQSVDANGHIEEDDDEDDEDDENSDKDDDSEEDDYPWMHSDADVNARTEEELWQNQNYLLELDPTEEKTCAPSAHSTPNHQQKSSTQAEIRKEGNQNRITEKLLQLKPEPMVDALEAPILPKWVAFKKKDKEHESVPESPEVPKQQPHQEDAIVDHNAIKNQLEVPKPDLKPKDQPKDEQRQDGQLDVRVEPQEDVRKVQKETLKRQPEDAPKHLPKAVAPKVTKTSSRESTLPKANTADIKDAPAQKVIANHQSTKTQTDPVKTQRLQVKIRQYEMHPDMRTGSSAPSDIRKQKNVDPVSTPETKTIKSKSMLVNDKKTTSETSQSPDQEIDVETVRRKLAEHLKKELLSQSHSSQVTLKKIRERVATNLIYPPPSAPVSSTTITPAPTPSTTPTPGSTPQHAVTSSMDQEISAAKSKSKAAEQIATPLTPQSNSSVSSTTSTIRKTLNNCSPHTYSKATARSGKLQSRFRTATFPYSTRTWEDQEFHCDNEFFLEEADELLADNPSLEIPKWRDVPVPPSSDKIDTELLSDATFERRHQKYVKDEVDRKCRDARYMKEQIRLEQLRMRRNQDEVLVALDPLRASTFYPLPEDIEAIQFVNEVTVQAFGENVVNMEARDDFGVPWVDAIEAPTSIARSKALAEPVATLASKKIPTTAAEARHQENHSSYVFPKRRKRQKN

SEQ ID NO: 42541 - DNA, 4391 bp, DROSOPHILA
gactgtacttgaacgcacacaaactggcgaaaaagatatggagaagacgtcgacgaactcgtttcaattgagacgcaaactgaaacacaattcatttcgctggagaacgcgcaaccgaaaacattttccacctctgctcttattcgtcttctaactgatatttttttactcacggtttcttggcctttggtcttttgcgtctccgatagagccccaaaaataaaatggagcagtggaacaatgtggagctgacgaacatgtccaaaaagtcgtataccctgaatcatgcctacgatgccgccgagaagttgaacaaggaaaacacggcaaagtcctcgaatggcaatggcaccagtgccgatgaatcaacagctgcagatggcgatctcctcaagccaggatcggacgtgcgcccaaaagtggagcccgaggacgtggagagcctgctgcgtcgcctctacgggatcacgataagcgaggttaaggaaatcgtcgcctacgacgatcgcaacttctttgtcaaggaggataggtaagcaaagcgatgacagtatctcgctgacaccctttcccaatcccgcaccacatccggaggtttatctcgtgtatgggagttcagcgtaagcatctcatacagctgcagtcagattattagcacaggcaatttcaaacatcataatatatcatttagatcaggattagtcttctatatagtaaacacaagaattcgttgcttgaaataatatctcctttaaagcatcaacacaacatattttctgtgctttgacatgactgcaattttagctgctgttcgtagtacgactgtgcaacacgaaaacaaataataatgagccggagaaatgcggcggtatgtagcatctatttatacccagtttaattaaagttgttagtcgcggcagttgagtgtgacgcagtcgacagtcaccttgccagcatcgcaattgctatcttgatggattcatggcattcagcactgatgtagtcagttcagctcttcactttaataaattagataaatctagagaacaaaaagcttacaatctagaagagccatctatttgaggacaggtttcgtctggaagccaaacatgctgagcttggtttgattctggctcacggcacccagttttccattcgtcctagatttaggagtgcccttcttggcagtggagggtttactcagccccactcttcgtttgctggttggcaaaaagttctggcgttgctggctggaggatgaggtagatgatgctctctgatccgagctacagctgtcgtccgatagcagaatgatggcatcattattgttcctgtcggattcctgagtgggttccggagagttttccagaagtaaatccagtgacttaatgcgaatagttgttgaattggtattgccttcagttggtatttggggttgagagttgttgagatcttcttgggattctaaaggcgaaggaacacctttatcttgtgattccaaaagagaagaggctgtggtatctgtatctgtttcaccgtcactgatttgtgaactacaacgttgtcttattgggttcttccctggaatgtctttacatactagtcttagtttcttatggcctgagtgagagctcagcttctgctcatccatatcgtcattttccgtatctcttaagtgctccctttgaagccttgtctgttcatcctgcgtggcgaagaagcgacttcggatctgaacttgttccttggcgaatatgcttcttttaagcgaatcaaccttttttacaccagcttctccatccaacggacttgcctttttcggactaagcaaacgcagcaaagaggcattctcacaaactactggggatcgctgattagcttcttctccagtcctttccttggcaaatggattgtgccgacttttgtgcaccggcgacggaggaggtgtacgttcttgatctacagaatcttccctgctcggacttctcctccttttggctttgaaactgtacatgttaaacaactcggcctccgtttgtttagcctgttccagtcgctgattagcttcgatttcctcgtttagagttttgcccacaaaatccacttttttgaagaacaaggcacacggattttctttcttcggcgtgtgagtgttttcgctttgaaaattcgtttgccaaatacttttgtgcttggatcgtttcacgttcttcggcgttggccatgccttttccggtgtccaagagtccagtcgcttcatagagaaggggttcaagttgcctagggccaagtgcaaagcctgctcgctatcctccagcaaggtgccagcattgctgcagtagcgctcatcagtttcataatcttcgagggcacacaaccgctgcatgcgacgctctagcgggttgtagataaacatgtgcctgaaggtggcctccgctttcatgaagttttcaatatagtcgtcatctacctggattaaaggattattagtcttacaattcagacctaaccgcaagttaacttacctcaagattgcgcatattgaggtaacttggaatcttttttaatgctattcgcatgtcttcctgttccgtttttagtataaatttgcacgccttggccagtccgatgccaggcagtgagtccaggtaatcacagccggataggatgcacatgcgccggaacttgtcaaagtggtacttctcctccgtgcagcccatggccaggtgaagtttttccgcctccaccagcaggccgctgccgttgaggtccagcttgaatatgatgttcttggctccaaaaagcgttaagtccgagtcctcggtgatgatgtactgggccacatctgctctattcagccaggccatttgggcatcggcctcgtagggcgccacaatgcagtcaacattccggctccggcattcccggatcaaccgcaacgccatgtcgtgggtgacatccacgcagcgtcgcatatgggatcgggcctcctcgatgcgacccaatcgaaggagttccgccgcccgctctttgctctgcttcctggagtcccttctccgcttttcggtcaaagccttggccggcaagtgctgcccatcgaagaccagaatgggcttgatgtcgtaggacagcagcatgttcacatacttcaagcagtattgtatataaacatccgtatcctcgccgcgggccaacttctccgcacagccgaagactcccttgtgtagccagcaatatgtgtccacggccactgtgctgccgcgaatgtcttttagatgcagctgcgaggaggccttgcccacgaagggaattaggccggtaatgcccatggttaggaccaacaacaataacacatataaaaacgaaataaacaattaataaaattgcggatcttagcgccaaaattgccaatgcatcagtgtgaccaaagtgcgatgctataaaaaaaattcgaattgccattcacatggaacgcatatgtctatcattatccaacacttggattttaaaaataattcaatatttctaacagatattattttgtatttttatgaatgtggcgctttgttatgcctcattttttatttactccttaagataagtaatttcctattgaatacatttccgtattgcagtaatgttaagaaccccctcattgtaacccactgtccacacggatacgtcctgaaaatcctcaactcactggactctaagaaagaggacttcgtggatgcccaaaaccagatgctgctttacttgggtaagaattgctagccaaatcatcagcaaattgacaatgcaatcgtattccctaggaaaacacagtgtgaaatgcccacgaccagtagccaatgcaacaggaaagtattactctgtggaacggctgaatgggaattcgaatgtggtgcgactgctggaatttataccgggagaaatcttccaccaggtgccggtgacgaagcacctgctctaccgcagcggcgaatacttggccaggttggatcgagccctcaagaacttcacccaccaggcatatgaaagccacaagaccttgtggatgcttcagagtgttcccgagcttaggcaattcctgtacgtggtgaaggatcaggagcagcggcttatctgcgacgaggtgatcgatgcctttgaagccaaggttctgagccaactgccatccatggagcaccagatcatccatggggacttcaacgaacaaaatatagtggtggagcaggtgcccaatcaaactgaatataccatcaagggagttattgatttcggtgatacgagcaaatcgccactgatcttcgaaattggaattgccctcacttatatgatactgcaggccaacgatttggccaatggtggcatatttctgtccggttata

SEQ ID NO: 42542 - DNA, 2336 bp, DROSOPHILA
atccgcaattttattaattgtttatttcgtttttatatgtgttattgttgttggtcctaaccatgggcattaccggcctaattcccttcgtgggcaaggcctcctcgcagctgcatctaaaagacattcgcggcagcacagtggccgtggacacatattgctggctacacaagggagtcttcggctgtgcggagaagttggcccgcggcgaggatacggatgtttatatacaatactgcttgaagtatgtgaacatgctgctgtcctacgacatcaagcccattctggtcttcgatgggcagcacttgccggccaaggctttgaccgaaaagcggagaagggactccaggaagcagagcaaagagcgggcggcggaactccttcgattgggtcgcatcgaggaggcccgatcccatatgcgacgctgcgtggatgtcacccacgacatggcgttgcggttgatccgggaatgccggagccggaatgttgactgcattgtggcgccctacgaggccgatgcccaaatggcctggctgaatagagcagatgtggcccagtacatcatcaccgaggactcggacttaacgctttttggagccaagaacatcatattcaagctggacctcaacggcagcggcctgctggtggaggcggaaaaacttcacctggccatgggctgcacggaggagaagtaccactttgacaagttccggcgcatgtgcatcctatccggctgtgattacctggactcactgcctggcatcggactggccaaggcgtgcaaatttatactaaaaacggaacaggaagacatgcgaatagcattaaaaaagattccaagttacctcaatatgcgcaatcttgaggtagatgacgactatattgaaaacttcatgaaagcggaggccaccttcaggcacatgtttatctacaacccgctagagcgtcgcatgcagcggttgtgtgccctcgaagattatgaaactgatgagcgctactgcagcaatgctggcaccttgctggaggatagcgagcaggctttgcacttggccctaggcaacttgaaccccttctctatgaagcgactggactcttggacaccggaaaaggcatggccaacgccgaagaacgtgaaacgatccaagcacaaaagtatttggcaaacgaattttcaaagcgaaaacactcacacgccgaagaaagaaaatccgtgtgccttgttcttcaaaaaagtggattttgtgggcaaaactctaaacgaggaaatcgaagctaatcagcgactggaacaggctaaacaaacggaggccgagttgtttaacatgtacagtttcaaagccaaaaggaggagaagtccgagcagggaagattctgtagatcaagaacgtacacctcctccgtcgccggtgcacaaaagtcggcacaatccatttgccaaggaaaggactggagaagaagctaatcagcgatccccagtagtttgtgagaatgcctctttgctgcgtttgcttagtccgaaaaaggcaagtccgttggatggagaagctggtgtaaaaaaggttgattcgcttaaaagaagcatattcgccaaggaacaagttcagatccgaagtcgcttcttcgccacgcaggatgaacagacaaggcttcaaagggagcacttaagagatacggaaaatgacgatatggatgagcagaagctgagctctcactcaggccataagaaactaagactagtatgtaaagacattccagggaagaacccaataagacaacgttgtagttcacaaatcagtgacggtgaaacagatacagataccacagcctcttctcttttggaatcacaagataaaggtgttccttcgcctttagaatcccaagaagatctcaacaactctcaaccccaaataccaactgaaggcaataccaattcaacaactattcgcattaagtcactggatttacttctggaaaactctccggaacccactcaggaatccgacaggaacaataatgatgccatcattctgctatcggacgacagctgtagctcggatcagagagcatcatctacctcatcctccagccagcaacgccagaactttttgccaaccagcaaacgaagagtggggctgagtaaaccctccactgccaagaagggcactcctaaatctaggacgaatggaaaactgggtgccgtgagccagaatcaaaccaagctcagcatgtttggcttccagacgaaacctgtcctcaaatagatggctcttctagattgtaagctttttgttctctagatttatctaatttattaaagtgaagagctgaactgacta

SEQ ID NO: 42543 - protein, 732 aa, DROSOPHILA
MGITGLIPFVGKASSQLHLKDIRGSTVAVDTYCWLHKGVFGCAEKLARGEDTDVYIQYCLKYVNMLLSYDIKPILVFDGQHLPAKALTEKRRRDSRKQSKERAAELLRLGRIEEARSHMRRCVDVTHDMALRLIRECRSRNVDCIVAPYEADAQMAWLNRADVAQYIITEDSDLTLFGAKNIIFKLDLNGSGLLVEAEKLHLAMGCTEEKYHFDKFRRMCILSGCDYLDSLPGIGLAKACKFILKTEQEDMRIALKKIPSYLNMRNLEVDDDYIENFMKAEATFRHMFIYNPLERRMQRLCALEDYETDERYCSNAGTLLEDSEQALHLALGNLNPFSMKRLDSWTPEKAWPTPKNVKRSKHKSIWQTNFQSENTHTPKKENPCALFFKKVDFVGKTLNEEIEANQRLEQAKQTEAELFNMYSFKAKRRRSPSREDSVDQERTPPPSPVHKSRHNPFAKERTGEEANQRSPVVCENASLLRLLSPKKASPLDGEAGVKKVDSLKRSIFAKEQVQIRSRFFATQDEQTRLQREHLRDTENDDMDEQKLSSHSGHKKLRLVCKDIPGKNPIRQRCSSQISDGETDTDTTASSLLESQDKGVPSPLESQEDLNNSQPQIPTEGNTNSTTIRIKSLDLLLENSPEPTQESDRNNNDAIILLSDDSCSSDQRASSTSSSSQQRQNFLPTSKRRVGLSKPSTAKKGTPKSRTNGKLGAVSQNQTKLSMFGFQTKPVLK

SEQ ID NO: 42544 - DNA, 3819 bp, DROSOPHILA
cattgatttcggactctttccaggtcatttgtcccggaaagcttagcctcagctcgggctcaattagtttgatggcgcttcttcctttttggttgctttggcttggctggccggccaaaaagttttcattaatgtaaaacactttacgcactcattagagtcatttgtttgtgacatctctatctcgcattccgtttccccggtccggtctgtggatgataaatgtgtccataatgcggcctaattgcggcatcattagaggcgcctttcggccctgattgccactcctacgaacatactcgaactggattggtacactgggggaaaataaattagtggcaaaagtaatggtgatttctatgtggagctatttgtgaaaggaacttcggtctattgatttaaagctacattagattgtttttgtgctgtgatttaatttcctggcaattttttttctcgaagtgttgggcaggcaaattgagtacttgaagtggacaaacggacttgacttaagcttacatatttcggcagactattggtatccaggcggctgtcatgttggattggcaacaaagcaaatcaaatttaatgataaactcgaatgaaagcacatgtcttttccgcccgagatgatatctgccatctatgccatccccccttatctatctcactctctagaatcgggtctttatatccgtgttggcgtaaacaacaacaacgggggcacataggaatgactaatttaatgcgtcgagtttggcgttgtgtaacgttacttatacgcaccgtgagcgccgggaccttttggcattttgcaaagttaacgaagcgaacgaagcaaacacgaccagacatatacaaaaacaacagcagcaacaaggacgagaaggggaaactgtgaccataatatactgaattttatttatagcataatttcaggtgtcgcgcacacacgacaaagtgttggaaaaaatgctcaaattaaagaacttaacttagcttaacttagtttagctgtaaaatttcgtgtttatttcgcgtctcttcaatttgactttcagcccatcctttgtgtgtataaaaggagctggccggtgggaaactttaagggtcttcacctggttcgcatccaattccaaatgaaagttttggagtaatttgatcagggccactttaattaccaactttgcaaagttctgtcctgtaattacgatgagaaaaatattgtctgaacattgctaaaataatttgaatcctatacgtacccacacactgcgatcccccaatgccaaatcctataaaaacattgctctttgtcttgtcttcacattggcccacatcgttggcagtttgcagaaatcgaagtggcttgtatttcataggctcactgaagtatttttcatctcggtgcatagccagtagaggcaccatcaaagtctttccctcatcaattgtgaattttgaattgggtagcgaataacttttgcggcaaacacgttcaataatgggtagaggtggatatttgcgaagagtttctgtaaaattgttagacagatgtcaaaatcactcaaacatttctaaaaattaaacatacctttcaagcacatgtccatatacctaagaccattaagctcttcaaatttgagctgaccattttcattgcttagctcctttatttccgctctcagtttttccactattaaaggttcttgcaggatttccaagagagtgaaggttacagttgaagctactgcatctagagatactttcaagagatcctcggcaactttggccaagcgtttgatggacaacagtttgtctgcatctagaaataacgaattagtacagcttttcacaatgcaaacttcaaaacttaccattaatcggttctagttgccatttatcgccgctaacttcgttgccatttctaaatctgactagtagttgtagaatatctttacgtatcagtccatgatcttctcgtagttcaacgctttgtttaatgagatctcttaagcggtaggtatatgaagatttctgcggcaggcgacccaaagtgctgaagttagaatggaaatgtaggaatgcttcaagttggaattcccattatgtgtacttacaaggattgtatcgaggcctgactatggctcaggtagctggtcaagatatgatcctcgtgctcaaagttattaatgtccaagccgtaaatcagattggcaattatgttgacggaataactaagagggaaaagaatattaacaccgtttatgccgagaagacttgtgcctcttcttacactctgagtttttgctggatatccacttcctgtggacatccttggccttgcctgtccagcaaatggtgaattaaatgatcacccactttctggacctgcccgaacatctcggacaatcgtttggtgccaaacatgggcgccagtttctccagcaaattgaacctgcgataacccgagatatagtcccacttcagttcgctgaagtgtccatttgattgctgcagaatcgtctgggctagctccacatttcgcaccagaaggacaggcctgaagaagcagtagatgcccagaagccgatccttgcccgactggtaggcctcacagatggcctccacgtgtcggaactcccgtctgtaggccttttgcaggaaactccacgtaatgccggccttttccgaggggaatcccctgcgtcgccagtggctgtaaatgtgccgcaccgagaggaataccgccgaatatagcagaataggcaacagcagccacattatgttgatgatgttgcgacttcgaagtgccctgacagactgttgcctgaagtctggaaaactaaagccgattctctgaagacgtctgccccgatgcagataattactgtgagttggcagcccctgtgcggatgatagcgataatgataatggtattgataatgatgaagatgccaaacgaaatcgaaagtcgcgatcgaatcaccgctcttctcgtctggcaactggcaacaactgccagtcaatcttgtctgaccaaaataacaaaaccgaaattcgaacagaatcgggaggaaaaaatcgaaaaaaaaaattccgggcatactatcacatctcacattcgccttcagttatctccctgtttctctttatggctgttctgagcggcctgatagtaatttatacagcccctgggctgtaccatgttattatcaaagtctggagcaagtttttgtacccaaaaaatacccattatgcgaaggtatctatcaggctattagctcaacatgatagatatattgacatctgtcaaataattcaaaaattctaagcaaactacaagacaaggcgctgcacttaaaaacattttagcaaatgaaatgtgttttaaatactcatcaaattaatgggcattaaccagtccaaactacatacttgtggtcattctttggttcctaagttgaagatgcagctatctgcattacttttgtcgttttacgttcccatctgacaaatgtattctgatttattatatctgttgataagaatatttactattttaaaatcgcaacgtcatcggcgtcgcttcaatggatttcgatgggaagcattatcaatggatcttagggcaatgatttccaatgcggttacgcatctccgggtggaacaaaagatgagcacctgacaacagattcctcattcgcaaggataggtaacgtgaacttgaagtctttagtaaaagagtgcctaatttatacatgtttatagatatgcaaatccctgacaaatcatggtttttaaaaaaggaaatagtca

SEQ ID NO: 42545 - DNA, 1524 bp, DROSOPHILA
tcagggcacttcgaagtcgcaacatcatcaacataatgtggctgctgttgcctattctgctatattcggcggtattcctctcggtgcggcacatttacagccactggcgacgcaggggattcccctcggaaaaggccggcattacgtggagtttcctgcaaaaggcctacagacgggagttccgacacgtggaggccatctgtgaggcctaccagtcgggcaaggatcggcttctgggcatctactgcttcttcaggcctgtccttctggtgcgaaatgtggagctagcccagacgattctgcagcaatcaaatggacacttcagcgaactgaagtgggactatatctcgggttatcgcaggttcaatttgctggagaaactggcgcccatgtttggcaccaaacgattgtccgagatgttcgggcaggtccagaaagtgggtgatcatttaattcaccatttgctggacaggcaaggccaaggatgtccacaggaagtggatatccagcaaaaactcagagtttattccgtcaacataattgccaatctgatttacggcttggacattaataactttgagcacgaggatcatatcttgaccagctacctgagccatagtcaggcctcgatacaatccttcactttgggtcgcctgccgcagaaatcttcatatacctaccgcttaagagatctcattaaacaaagcgttgaactacgagaagatcatggactgatacgtaaagatattctacaactactagtcagatttagaaatggcaacgaagttagcggcgataaatggcaactagaaccgattaatgatgcagacaaactgttgtccatcaaacgcttggccaaagttgccgaggatctcttgaaagtatctctagatgcagtagcttcaactgtaaccttcactctcttggaaatcctgcaagaacctttaatagtggaaaaactgagagcggaaataaaggagctaagcaatgaaaatggtcagctcaaatttgaagagcttaatggtcttaggtatatggacatgtgcttgaaagaaactcttcgcaaatatccacctctacccattattgaacgtgtttgccgcaaaagttattcgctacccaattcaaaattcacaattgatgagggaaagactttgatggtgcctctactggctatgcaccgagatgaaaaatacttcagtgagcctatgaaatacaagccacttcgatttctgcaaactgccaacgatgtgggccaatgtgaagacaagacaaagagcaatgtttttataggatttggcattgggggatcgcagtgtgtgggacagaactttgcaaagttggtaattaaagtggccctgatcaaattactccaaaactttcatttggaattggatgcgaaccaggtgaagacccttaaagtttcccaccggccagctccttttatacacacaaaggatgggctgaaagtcaaattgaagagacgcgaaataaacacgaaattttacagctaaactaagttaa

SEQ ID NO: 42546 - protein, 492 aa, DROSOPHILA
MWLLLPILLYSAVFLSVRHIYSHWRRRGFPSEKAGITWSFLQKAYRREFRHVEAICEAYQSGKDRLLGIYCFFRPVLLVRNVELAQTILQQSNGHFSELKWDYISGYRRFNLLEKLAPMFGTKRLSEMFGQVQKVGDHLIHHLLDRQGQGCPQEVDIQQKLRVYSVNIIANLIYGLDINNFEHEDHILTSYLSHSQASIQSFTLGRLPQKSSYTYRLRDLIKQSVELREDHGLIRKDILQLLVRFRNGNEVSGDKWQLEPINDADKLLSIKRLAKVAEDLLKVSLDAVASTVTFTLLEILQEPLIVEKLRAEIKELSNENGQLKFEELNGLRYMDMCLKETLRKYPPLPIIERVCRKSYSLPNSKFTIDEGKTLMVPLLAMHRDEKYFSEPMKYKPLRFLQTANDVGQCEDKTKSNVFIGFGIGGSQCVGQNFAKLVIKVALIKLLQNFHLELDANQVKTLKVSHRPAPFIHTKDGLKVKLKRREINTKFYS

SEQ ID NO: 42547 - DNA, 3154 bp, DROSOPHILA
aacgatccagtttaagccatctcaagttttgctaattttatgaaaacgggctataatatttctattggtggcattcacatccatcgatcgttgaaatcaaagtatcactaaaaatgttacaatgatctgacttatttcaagaaaaatatatagttctcgacaattacattaacatcctgcccatttgaaaaccatttattgaccacctagttagtttactatatactatcttacttatttcgttgtgcattctattccagacttattgaagagcaatttctcagatttctgtggactcaagctatacaccatagttatagtaagctaagttaacaatctgtatttagttttataaatacaaacatcaatgtgatatttgcaattgaaaactgttgtgtacgatacgtcttttgtctttctggatcctcgacttcatccgtttcagatagatactcgctcggtccacccacagttcccatagcacttacaaatgactatgtttaaatcaattttcgtctaatcttcgaaggatctaaggtagcgactgtgtttatcctcagtgtgtttacctgttgacgtttgcggcatttaatcacttctgttttggagttccatcactttgagtcggaagcggaactcattaattctcggtttgttactgatgttatgacctttcgttttggttcgtgggcgtggcgcactgcctagcttgccatgccgctctcatctttcaaggataacaaggataccctttttcgggctgagatgaaagcgtggcgaataaaaacaaatgtggaggcatcagttggattgataaatggagtttttacatatatttatgtaaattaataagtctgataagttatttacatttcagtacctataaacttcctatcttttttttaaatatttattggatttttccctttttctctctaaaaatatctgctctaaattctgtatatgtaccagcaaaaaatgcaaagatacaattcaaacaaaatataaatttccaagttcgcacaacattattttcattccaactccaccatttcatacgatatgaatttaaaacaatataattgatttgtattttcatttttattataaaactattgcttgaattgtgtacaactatgataataaacgtaaaactaacagcctttataagatttccactaggatatgaaggtgttgctgcaacacagcccgcaaaaggaacttccatttgaggaagaaaggataaaggatcgcccacactggctagtagtctctggacagcaacgtgaccagatccccgatgtatgcttgcgccatttgcagagtttcgtatttggagagtcgccgatcgtggccgagtgatggaaccacatctctcaacttgtcgaaggcatcgttcaggctgttcatccgcctccgttcccgagcattggcggccagtcgccgttttttgaggacttcgccaccgaatcccgcggacgatgaactgctcgaagaggcggaggatgtagatgatgacatggaagtggacagcttgtcgtatggcttgctcctctgctgcttgttccagtaccttggacttctgccctgattcttgcccaagggattcgcttgaaggtggtgctgctgctgctcctgggcattcagcatgtgctccaattccaggacagacggcgtatcgtaatacatctccaaggagcaactgttggcgccatccgactggctgtcgctggtgctgaactcctgctggtacatgagctgctccaactgctggaaggtgtcgttgctcaggaactcgggaatcgctggggcttcgtcggggaagtagaactgctccattagctcgttgttggtcaacatgtttacgtttgcaggctcaagggacaactgaagtggctgcttgaggatgggtctttatatagctgcctgccgaggattcagctctcacgtgattggttcactacatatgtcctgttacctgattcgctgcctcaagctgatccgatccgctcaggtacccgattgccaacctcttgaggatcagcagcacagcccgtgccctaaattggcttgcggtcaagacgtttaattgtctctggctgcaactctctccctctttctcccaggtatttactgtatcagctacaggtcgactccttttgtttgacctgtcatttggctaccgtctgtaatcatacctcttttgttacttgccctggaattgactttttatattcaaacaaaatttagccaaggtcaaaatgcgaacgcacaaaagactcttgtcatatgggaatattttccacaatgtgtgcctccatcgaagatcgccatggatcatcttggttgcatgtctgtggtctagtgagtggagtgctcgactggttggatgcaaaccccatttttcggacagaacaaagagcaacaattgtgcttgtgcggtttgtgactttcgattttaggcggttgtacttactttattgggtcaaatttaagtgggtgtattaatagtggctttctcctgctttcaatggccaaattacaggacgtcgagaagttcgaaattcaaaaaagcatgaagaaatcaaagcaagtatcacattattattatttattattattttcatattaagggatttgaaatgtgctatattaacgcctttactgaagagttacttttccgataataaaactacactactttaacatgctgaaaccattcgatgggtccttcgaaactctggtgcaatatgttgcaccctcacattatatactttcattcgtatgctctggtttccacagtcatcttgggatcaagcccactttcaagtgaccgcatcgaaaggctaattaactccacagactcgcagcattagagggaaaatcaattcgaggagttcgctgaatttctaaggaaactgggcaaaacaattggaaaacactggccgagaagcgccgagcatggctaaagagtacaaatgatgccactgcaagatggcccagttacttcgcccaaattgtcaaggaacaaagtcccgagccgacaaaggatcctgacgtttgatcttgacgatgatgatgatagctgatggatcgatcgatcgctcgatcggttcactttgttaagagtgccacgcgaccgcagcttagtcga

SEQ ID NO: 42548 - DNA, 1154 bp, DROSOPHILA
gtcgacctgtagctgatacagtaaatacctgggagaaagagggagagagttgcagccagagacaattaaacgtcttgaccgcaagccaatttagggcacgggctgtgctgctgatcctcaagaggttggcaatcgggtacctgagcggatcggatcagcttgaggcagcgaatcaggtaacaggacatatgtagtgaaccaatcacgtgagagctgaatcctcggcaggcagctatataaagacccatcctcaagcagccacttcagttgtcccttgagcctgcaaacgtaaacatgttgaccaacaacgagctaatggagcagttctacttccccgacgaagccccagcgattcccgagttcctgagcaacgacaccttccagcagttggagcagctcatgtaccagcaggagttcagcaccagcgacagccagtcggatggcgccaacagttgctccttggagatgtattacgatacgccgtctgtcctggaattggagcacatgctgaatgcccaggagcagcagcagcaccaccttcaagcgaatcccttgggcaagaatcagggcagaagtccaaggtactggaacaagcagcagaggagcaagccatacgacaagctgtccacttccatgtcatcatctacatcctccgcctcttcgagcagttcatcgtccgcgggattcggtggcgaagtcctcaaaaaacggcgactggccgccaatgctcgggaacggaggcggatgaacagcctgaacgatgccttcgacaagttgagagatgtggttccatcactcggccacgatcggcgactctccaaatacgaaactctgcaaatggcgcaagcatacatcggggatctggtcacgttgctgtccagagactactagccagtgtgggcgatcctttatcctttcttcctcaaatggaagttccttttgcgggctgtgttgcagcaacaccttcatatcctagtggaaatcttataaaggctgttagttttacgtttattatcatagttgtacacaattcaagcaatagttttataataaaaatgaaaatacaaatcaattatattgttttaaattcatatcgtatgaaatggtggagttggaatgaaaataatgttgtgcgaacttggaaatttatattt

SEQ ID NO: 42549 - protein, 198 aa, DROSOPHILA
MLTNNELMEQFYFPDEAPAIPEFLSNDTFQQLEQLMYQQEFSTSDSQSDGANSCSLEMYYDTPSVLELEHMLNAQEQQQHHLQANPLGKNQGRSPRYWNKQQRSKPYDKLSTSMSSSTSSASSSSSSSAGFGGEVLKKRRLAANARERRRMNSLNDAFDKLRDVVPSLGHDRRLSKYETLQMAQAYIGDLVTLLSRDY

SEQ ID NO: 42550 - DNA, 6389 bp, DROSOPHILA
ggaacaataaaacaataaacagaatatcgctttatatagtggcgaaaagtccaatttgccctttgatagcgaaaccaaataactgaaaatctatatatagactataagattttgtataacactcagtaaaaagccaaaatcatttacataaatacatatcgctaagtctttatttaaaatattggaaagaaccgattacaatgaatgctgtgatcaattattatattattagctaggtcacagttccataaagtttacacacacaaaacacttgtctacgacaatcgatcaatgtccgtccgagctgtgaaggtcttccaaaaatggattacaaactaagtgcaatatgaaatcatcaattttacaaccacaatggaacgcggttatctaatactttttgtcctgtggtctgtttaatcgtgaattagtaatagtagatattcataatcaatcacaaagaggttaatatcggtgtgagttccgttggggatgagttttgaatatgatattatttatcaattgctggatggtccacgtgtgttcgattaaattgtttgcaatagtactctgatatgattaaaaattttgattcggaatttacgacactgttttgtgggtctgtgcgaataaatattaaattagctacaacatgaaattaacaaactaaaggcatactacttttatagggtgaggcgatgcagttggtataatattataaaacaaagacacaaaaggtttgtctaaaaagtttgtcatttttaagtagttgcaataatataatcgagccatatgtttgccctttcggcatcggcaacatgtagatcttatgtttttgtgattgcaacttaatcggctcaccctaatgtataatattactcgataaagctacgagcacacaaaaacgcacacaatgttggaaatacaccctcacaattggttaaatccggttgcactccggattttatcactcatggaaacgcgaatatctccaattcgaagtctagagcgttgtggaggtcaccgtgctgacaccatggacgagaatggtgggcggcaaatcggcggtcagttcggttagcagttccatatagctggcgctgcgttgcgcgaaatccggcgccgagagctttggcggagcggccagatagatgaacgataatgccgtctgatccgagcgttcgcgtatgatttgattggcacgctgcatgtagagaagggagcgattcagggtctcctcgcccacctcgtcatcatcctccagcaccacattgtccgcctgagcggtgaactgcttgagggtgcgtgcatgtcggctgaagtcggtgtcccgactccactcctggatctccacaatgtcggctgtgatgcgcagctccttaagagactgctccagcttcattttcgagaaaatctccatttgcggggtctgggtgtcgaaagtgctgagtaaaatagacgataaatatattaaatgtttataaaattttgtattcatttcacataccccactgtccgctcgtcgttggcctcgcacaggaaaatcctcactctcagatgcttccatttggccagcataatcaccgccaattgcatcatgaacaaagacaccatatcgaagggatctccagatgttggattgaatatattgatgggccacacatcaatgtacttcacatgtttgctcctgcattcaataatgtttttttcaaaagtttgctcaagaattaaaagtagattttcaactcacatggaaataaagtttttgtccaatctttggaaatttctgcacaagcacagattcttcttcatcctaagggtgtcgcacaggatctgaacgtactcctgaatttggaattgcttcggatcgccatcgcgtcgaatggggaagttttgaatttcgccattgttaaagtcatcggttttatagggggaggaaccgctgaaaaaaatgtacatagataagttttgtaatactttcagataaaaaagttagacacacttttgaaaaaagtccctgggagcctcgctgtcgtagaaacccaagataatcgtgtttggtttcattgctccaattcctgataagcgaatcaggtgctggactccctcgcggatgctccgactgagagtgacctctgtaaaggccttgactctcatgtgatctagaaatgaccaccactgctggttgtcctcggcatcttcgatgcctttgaagtcacccaattttacatgaccaatgatgtacagaccgctctttttgagatcatttacaaagtcaaccagcgggcagcaggaacgtggcgatgacacgagcagtaagatctgcggacgccagaacttaacgtgatccttgcggggatccagcattaacagatactttcgcacctggtggaacatcaaagcctgggagatcgagccccattgcgctgcctgagtggcaggcgagaacaaatgtaaagcaatcaccaggatgaggcacagtataatgcacgaagaggcgtagatgaagttaatcacaaacatcatgatcagagtgcccagtaatccaaccagacaggtgtgccaggtgaagaacttaaatagcggccggaagtttggagctcccgtgagttcaatgcccaagcaagccaggttggtggctaaataggagagcatgaagagcaccgaatttatctgggcgatgatgttgaaggatccaataagcagaatgcactccacgagacaccagctgacagcaaccgctgcaatgggattgcccttccaagttccatgaatcacaaagtttagaagactgccaaacacttgatccttagacaatgcctccagaatcctgctggatccaatcagattgctcagacttgttgaaaaggtggcggtcaaaatgccgatcgccgtaaatggaggccaaagattcacgggcatcaggaacaggtaattgttctgcatggtaaagtacggagtcgtgcagctcatgaggaaggacaggatgatgtaggagacgaaggtaaacgccactgccgagagagtgccatagggaatactctttgatgggttcttcagttctccggacatattcgctcccgccattattccagtgactccggaaaacagcacaccgaaggtggtggagaaatcgacttgtttgccattcgacgtgtaatcgcgaccgtagtgggatcctagattatcccgcagcgttgtggcattcagccctgtatagtcgagaaatgttgtggtattcgataaaatattgtccccaggaacgggtatctggaatagaagaaaagagtatcgtgttaatatcgccagaaaggttgcacatatatacatgcttagtttttcattacttgcagtccggcacgctctttcatgactcaaacattgttatcagtttattcagcttatagtctgcctgccttacaagtattgaataaaatgttcttgaaaagattttttttttcaaatatgtggctttgaagaccaaccttaagatacagtttagatcgtggattatccttttttttaatctttgatcttttaatagtcacatgcaaaacggtttccaaaaaaactacaaactacatttcattttattacaaacgaacacaaaattgtcttactggcccattatgattcaaatatcaaatacttgtaattatcaggaaaacatttcggttaaaacccctttaggtattgtaattaaaaaaagatttgtgaatcagccttataaatgccacacataaatgataaaacgtgtgtccaattccaccaaagtaaaccctgaccaaatatttataaaaagcccgatttgatcccaagatagactagatatcagtatcacatttaaattgataagaccaacagggcttttcctcaatgagcaatagctacacagcaaaaaaggtaatttcatactatatcacataatcatttaaagtttgttaaaatatgtaaggtctatgaaaaatgtagcagtagtagccctaattttttgtatactattcaattttttaaatacaatatttttaaagagtgcaacaaaatcttatcaatacatggaaacataagacttttccccgatgtactaaaagatatcttaccgtgttattggtggcgcccacaaatagaaaactaaagtaagtggcgaacaggcaaacggtgacggtggccaaaataatcactgacgtcttggcgaacagagcggcgcccaccaggcaaaccagcagttgcagggtgtttatcatgctgctggtaaggaaacgccaccaatccccatccggtaggtgggagtccccgctcacaaaatggccacgcggtccgaagttatccatgatgccctcagtgcagccggatatggccattgcagatcccaccacattggcaaagaaaaagagggttccgatcgagccaccaaactccagtcccagcgttcgactaatcatgactgcaaaaaagtgtgataaaataaatgatttaatgaatgtaaacgagaaaaaccaaagcagagcgtaacgaatccgcctattttcgaagtatttcatagtcagagatactaaataagtaatatcgattaccatataaaatatttgacaagtcgttggcttaaaaacatgcagttttgcatgcatttttattgtttgtaagacatacaaaatatattaaaatgtaactttgtggttactttcaataaatgtacatatgtatatacaaatgtatatagattagaaagtaatttaattattgaaaacaaagtaacagattaaataataaaatatgtatatatgagaattaaaaagtatttacgcgctaattagttagttactcacaataaactccccctccctcgatggctccattggtggaaatggcgcagaccgaagccaccgtgaagagcagaattccgtaggcgatgaggaactgcagcagggttacatacaggcccgcatttccgacgatgtaccctgaacaaagagagttaaatagtggaaaagaccgagatcaacggaccatcacaacaagtgttttgtgacgtcatcgccgcgcacttaccgactcgaatgaagaccaaagcactaaacatggacaaagccactggactaaaaactccggcaaaggtaccgagcgtacggccactacgatccgggtcctgcattccgaactccacatatccgtcgccatcctgcggggtgtgggggcgatcgccactgttttggctgccgccgaataaagatccgaaactgcggaaaacactgcccgtacgaccactacgggaattagctatgggagccgtctcctgctccgcggaggcgctcatctcgatgtccgtggtgcgggtgcgagaaatccggaaacactaaagacgtttcaacgaacgcctacaatttccagctgtcgcagaccaataagaataatcacaatcatgggcagggtgtagaaaatttttaacggggttcttaatgcaaatggtatacacaaatttactaatcacacctgaatgtgccctacatatttaacacttataatgcgctatctggggtcggataaccccagactttataaataagtttataaaacactagaaatttcgatataataggcatttgtggaacttttaaccccccacaaccacttctacgaccatgtttttgaagtcactcaaataatgtggcagtgaacttaaatatactaggcttcagagcataaaaaatactaaactgtaacaatatttgtgcagtatatatcgaatatgaattcaaatatctttaaaatcttaaatcatagtttataaacaaatctgcagttgttgcataaaacatttagtcggttttaagactttatctaaattaatttaatataataacacatagtaaaaccagcgtcaaataaatatttttaacaataatttatacgatttttttatgtgttaatgtaaaaaataatattcttagcagaaggcaatcactgcatgtaaggcaattaggtttataagggagggataatcactttaaaataattaactaggtgagcagttgatggtacatgaatagtacaataacaaccgataaagctaacttaaaaatgccttaataatgaatgtacgcaaagttaatagtcaagtccagatatcactaattaaaaagactgctaaagaaaaatgatttaatgaatgaccaatcacattgattgtctctaaatatagtacttaattggtcggccttcttagaaactgataataaaatttggctcttcaaaacagataagttttgggttttctacggtccgtttttctataaaagtgagacaccaattggagaatatttcattgacccgatataatgaaggccttgcaattcgctcttgtattttcggccattctggccattgccttcgct

SEQ ID NO: 42551 - DNA, 2904 bp, DROSOPHILA
acagctggaaattgtaggcgttcgttgaaacgtctttagtgtttccggatttctcgcacccgcaccacggacatcgagatgagcgcctccgcggagcaggagacggctcccatagctaattcccgtagtggtcgtacgggcagtgttttccgcagtttcggatctttattcggcggcagccaaaacagtggcgatcgcccccacaccccgcaggatggcgacggatatgtggagttcggaatgcaggacccggatcgtagtggccgtacgctcggtacctttgccggagtttttagtccagtggctttgtccatgtttagtgctttggtcttcattcgagtcgggtacatcgtcggaaatgcgggcctgtatgtaaccctgctgcagttcctcatcgcctacggaattctgctcttcacggtggcttcggtctgcgccatttccaccaatggagccatcgagggagggggagtttatttcatgattagtcgaacgctgggactggagtttggtggctcgatcggaaccctctttttctttgccaatgtggtgggatctgcaatggccatatccggctgcactgagggcatcatggataacttcggaccgcgtggccattttgtgagcggggactcccacctaccggatggggattggtggcgtttccttaccagcagcatgataaacaccctgcaactgctggtttgcctggtgggcgccgctctgttcgccaagacgtcagtgattattttggccaccgtcaccgtttgcctgttcgccacttactttagttttctatttgtgggcgccaccaataacacgatacccgttcctggggacaatattttatcgaataccacaacatttctcgactatacagggctgaatgccacaacgctgcgggataatctaggatcccactacggtcgcgattacacgtcgaatggcaaacaagtcgatttctccaccaccttcggtgtgctgttttccggagtcactggaataatggcgggagcgaatatgtccggagaactgaagaacccatcaaagagtattccctatggcactctctcggcagtggcgtttaccttcgtctcctacatcatcctgtccttcctcatgagctgcacgactccgtactttaccatgcagaacaattacctgttcctgatgcccgtgaatctttggcctccatttacggcgatcggcattttgaccgccaccttttcaacaagtctgagcaatctgattggatccagcaggattctggaggcattgtctaaggatcaagtgtttggcagtcttctaaactttgtgattcatggaacttggaagggcaatcccattgcagcggttgctgtcagctggtgtctcgtggagtgcattctgcttattggatccttcaacatcatcgcccagataaattcggtgctcttcatgctctcctatttagccaccaacctggcttgcttgggcattgaactcacgggagctccaaacttccggccgctatttaagttcttcacctggcacacctgtctggttggattactgggcactctgatcatgatgtttgtgattaacttcatctacgcctcttcgtgcattatactgtgcctcatcctggtgattgctttacatttgttctcgcctgccactcaggcagcgcaatggggctcgatctcccaggctttgatgttccaccaggtgcgaaagtatctgttaatgctggatccccgcaaggatcacgttaagttctggcgtccgcagatcttactgctcgtgtcatcgccacgttcctgctgcccgctggttgactttgtaaatgatctcaaaaagagcggtctgtacatcattggtcatgtaaaattgggtgacttcaaaggcatcgaagatgccgaggacaaccagcagtggtggtcatttctagatcacatgagagtcaaggcctttacagaggtcactctcagtcggagcatccgcgagggagtccagcacctgattcgcttatcaggaattggagcaatgaaaccaaacacgattatcttgggtttctacgacagcgaggctcccagggacttttttcaaaacggttcctccccctataaaaccgatgactttaacaatggcgaaattcaaaacttccccattcgacgcgatggcgatccgaagcaattccaaattcaggagtacgttcagatcctgtgcgacacccttaggatgaagaagaatctgtgcttgtgcagaaatttccaaagattggacaaaaactttatttccatgagcaaacatgtgaagtacattgatgtgtggcccatcaatatattcaatccaacatctggagatcccttcgatatggtgtctttgttcatgatgcaattggcggtgattatgctggccaaatggaagcatctgagagtgaggattttcctgtgcgaggccaacgacgagcggacagtgggcactttcgacacccagaccccgcaaatggagattttctcgaaaatgaagctggagcagtctcttaaggagctgcgcatcacagccgacattgtggagatccaggagtggagtcgggacaccgacttcagccgacatgcacgcaccctcaagcagttcaccgctcaggcggacaatgtggtgctggaggatgatgacgaggtgggcgaggagaccctgaatcgctcccttctctacatgcagcgtgccaatcaaatcatacgcgaacgctcggatcagacggcattatcgttcatctatctggccgctccgccaaagctctcggcgccggatttcgcgcaacgcagcgccagctatatggaactgctaaccgaactgaccgccgatttgccgcccaccattctcgtccatggtgtcagcacggtgacctccacaacgctctag

SEQ ID NO: 42552 - protein, 941 aa, DROSOPHILA
MSASAEQETAPIANSRSGRTGSVFRSFGSLFGGSQNSGDRPHTPQDGDGYVEFGMQDPDRSGRTLGTFAGVFSPVALSMFSALVFIRVGYIVGNAGLYVTLLQFLIAYGILLFTVASVCAISTNGAIEGGGVYFMISRTLGLEFGGSIGTLFFFANVVGSAMAISGCTEGIMDNFGPRGHFVSGDSHLPDGDWWRFLTSSMINTLQLLVCLVGAALFAKTSVIILATVTVCLFATYFSFLFVGATNNTIPVPGDNILSNTTTFLDYTGLNATTLRDNLGSHYGRDYTSNGKQVDFSTTFGVLFSGVTGIMAGANMSGELKNPSKSIPYGTLSAVAFTFVSYIILSFLMSCTTPYFTMQNNYLFLMPVNLWPPFTAIGILTATFSTSLSNLIGSSRILEALSKDQVFGSLLNFVIHGTWKGNPIAAVAVSWCLVECILLIGSFNIIAQINSVLFMLSYLATNLACLGIELTGAPNFRPLFKFFTWHTCLVGLLGTLIMMFVINFIYASSCIILCLILVIALHLFSPATQAAQWGSISQALMFHQVRKYLLMLDPRKDHVKFWRPQILLLVSSPRSCCPLVDFVNDLKKSGLYIIGHVKLGDFKGIEDAEDNQQWWSFLDHMRVKAFTEVTLSRSIREGVQHLIRLSGIGAMKPNTIILGFYDSEAPRDFFQNGSSPYKTDDFNNGEIQNFPIRRDGDPKQFQIQEYVQILCDTLRMKKNLCLCRNFQRLDKNFISMSKHVKYIDVWPINIFNPTSGDPFDMVSLFMMQLAVIMLAKWKHLRVRIFLCEANDERTVGTFDTQTPQMEIFSKMKLEQSLKELRITADIVEIQEWSRDTDFSRHARTLKQFTAQADNVVLEDDDEVGEETLNRSLLYMQRANQIIRERSDQTALSFIYLAAPPKLSAPDFAQRSASYMELLTELTADLPPTILVHGVSTVTSTTL

SEQ ID NO: 42553 - DNA, 3184 bp, DROSOPHILA
tgccaaccacccggctcgtgacgtcacccaccttcttaatggctgccttggagttttcgggcgcatcaaagccggctgcccggttggcgattggccagtaactgggccattcctctggagaactcagaaggcttaggagtcgcttctcgttgggacttcgttgcagtttgacgaacttggaggcgatgcacacaacgagcaaggtaagagtgcaccacgggatggccaggttgcaaaagagccagaatacgttgaagcagaagaagatcagactcacggagcagcacagcagctggtaaatcattttgagcgccagccacaacaaacgccaataggacattcagcagagaactgtgtggagcaaatatatatatggacataaaggttgctggtctaaggtgtctcgtgtctatgtgtccactcagctgcacttaccctaaatagaatgcgtgccgccaccaccacccgttagtgcaccacttgccactccctccttggatactttcgattatgcaccgtttctttgattgtgttgaaactttctattccgcgcagtttgcttcgatttctttatatcaaagggccactgttctaatagattctttcaataatagccgtcgaaaacacaaatcaaatttcgcaaaaaaggagcgtacattttctcagccagttttctatcgctgcttgggcttatcacgtatcgttatcgtctttcaaccccaatcagctgtttgagtatcgatggagtttggtggttagggcgcgcttttttaaattaagaaagtgaaagcatataaagtagcagtattatatattatagaactaaagaaaagaagaacttacatattaacatgttactacttattattgcttatagggcatttatatataaccctaaaattaaggaaagccaaagcaaataaaatgcaattccaaaatacatcaaccaatttatgcagaaatcttttaatatataagttccatttaatccgctgaaaatctacaactttgtgagcaggcgtatccaacggcgtatagtaggatgggccaggcgggtgtaaactcctggatagtacggatccgcgcagccaactccccaggatacgattccgataagggttccctgtgcgctgatcggacctccactgtcgcctgaaaaatgatgaggttcacggtgtcattatcaacatgtcgattaaacgtaattgtaattatctgggctcaccttgacatgcgtctgtgtttctggcggccgcgcagaacattctgaaagataatataaattgggaattaattggctttgtcttaccaataaacacttgagaacaataaatagagatgtatctcaagtaccaactcccttttgaaaatttttaaattgtgctcaagcagtgagtgacttcgtgagttttttggggcttctgtcttctagaattagaagtatttttggaaaggcagagttgtgtatagagataaactcttaatttgttcaatctacatggcataatatgtagggaatagtctcttgggtaaacagaacttaaaaaagtagtatgattcccctgcttacgcttcggtgacgcctccgtgatggcgtagatcgttgtggcacttctcttggttgactgtcagtaccgtagtgcttttgagtaccgacgacaggacgggattggaggtgctcatgtgtccccagccggagacgacggcgggcatgctttccgagatggcctcgccaacggtgggcaatcgaatgggcgccactttgcccaacggcaggctgagtgctccgtccgctgttcgtagaagggccacgtcgaagttcatgtccgcccgatcgtaggccggatgcttgtagatggctttcaccggctgaacagtgccgcccgaggtacgcatgatgctgccctggcggagtgtgaattcccgcggctgctgctcatgcccgtcgatgcaatgagcggccgtaatggcccagttgctggagagaatcgaggcgccgcagatgtgtaccgtttggcggcgcagcgagagttggtatggaaactggccttcggtggcttcgcgtccgttcacaatccgactgtccggctgccgagggacggcagcctctgtgcgggatgcttccaggatcacaaggatcccagctatgagaagaaacggaattggagctcggcacttttgcatgacgctgcgaacgagtggaaactaaccagcattgggaatccgtaagtcgatatattcaatggcgctttatcaatcacggacgttatctagtggggtacacgatttctgaagaagctgctccgttgcccgtaattagccattgtcgcttgggtttttttgttgcctatctgccagattctctgattttattactgtttacagcggtgacgatggcaatgaacttccgcaagagcatcggggaaatgcagaaatggttaaaccattttgataaaaaaaggtagtttttatctttttaaaaaatcgattcttatgggaagatcagaagatatatatatatagatatcacaagatcacaagatatgaggtttaaaatacccaaatataaatgaatgtaagatggatgtttaaatgttcttttatttaactgagttctattaattaccggattcggatttttgaagaattggaaacctatatatactaaaactagttgagggtctataaatacttaaaattataagaaacttttgttagtcaatactaaaaggcatttatccagtagcatggccgtttagaataatatttatattattttataaaaaattatttgtaatatttttaaagtgttccgactcaaaattgttggaaaaaatactgaaccacttgaccagcatcgatagtcctataaaagtgtcgatgtttcgataaaaggccacacagtggaatactcgcccaacttagctgcggtcacacttagtctgcaattttcaagaattacacacgcgcggatgtttttcggttcatcctaagaaacataaaattgcaacgcaaagagcagcttaaaatcgcgaattaacctttaggcttaatagtaaaaataaagagtgtacatcgtacacaattcgcatttgtcggcacaattggtgcgagtgcgacaacaatagcaggccgagtgcagcagtgcgattgcagcaaagcgaagggaaaaaccaaagaagtt

SEQ ID NO: 42554 - DNA, 807 bp, DROSOPHILA
atgcaaaagtgccgagctccaattccgtttcttctcatagctgggatccttgtgatcctggaagcatcccgcacagaggctgccgtccctcggcagccggacagtcggattgtgaacggacgcgaagccaccgaaggccagtttccataccaactctcgctgcgccgccaaacggtacacatctgcggcgcctcgattctctccagcaactgggccattacggccgctcattgcatcgacgggcatgagcagcagccgcgggaattcacactccgccagggcagcatcatgcgtacctcgggcggcactgttcagccggtgaaagccatctacaagcatccggcctacgatcgggcggacatgaacttcgacgtggcccttctacgaacagcggacggagcactcagcctgccgttgggcaaagtggcgcccattcgattgcccaccgttggcgaggccatctcggaaagcatgcccgccgtcgtctccggctggggacacatgagcacctccaatcccgtcctgtcgtcggtactcaaaagcactacggtactgacagtcaaccaagagaagtgccacaacgatctacgccatcacggaggcgtcaccgaagcaatgttctgcgcggccgccagaaacacagacgcatgtcaaggcgacagtggaggtccgatcagcgcacagggaacccttatcggaatcgtatcctggggagttggctgcgcggatccgtactatccaggagtttacacccgcctggcccatcctactatacgccgttggatacgcctgctcacaaagttgtag

SEQ ID NO: 42555 - protein, 268 aa, DROSOPHILA
MQKCRAPIPFLLIAGILVILEASRTEAAVPRQPDSRIVNGREATEGQFPYQLSLRRQTVHICGASILSSNWAITAAHCIDGHEQQPREFTLRQGSIMRTSGGTVQPVKAIYKHPAYDRADMNFDVALLRTADGALSLPLGKVAPIRLPTVGEAISESMPAVVSGWGHMSTSNPVLSSVLKSTTVLTVNQEKCHNDLRHHGGVTEAMFCAAARNTDACQGDSGGPISAQGTLIGIVSWGVGCADPYYPGVYTRLAHPTIRRWIRLLTKL

SEQ ID NO: 42556 - DNA, 2404 bp, DROSOPHILA
tgacaaataaacaaagaatagcatgcctttaagccctccagttttatctgtcctcgttattctatgtgtttgttaattataaaatttactaattttcacctaatcgagttataaataaatgtgtaatattttttcattctaggtcggaggagattcctctcgaggacttccagcactcacggaacaacagtccgcactctcggggaaacccctcgcctgcctcccgctcacacacacccatccgcgtgctccactacgatcagctgtccggtcatagcggctcaccacgtgaagcgtccctggggggaactaacgccctgctaagccagttaaatgggctgaaccgtgaagtgctcccaacgcagagctccgaggagacttcttttattgggagcgacggaaacgaggccactggcggatcggagggcaggcgacggggggccatagagacggtttaagatagactagaagttttagtattacattggaagcagccttatgcttagattgttgctaaaattttgttattccagttgactaataaggtggtacatactctaattccttttcattttaaataaaaactaatttgacgaatttgagctcaagtctatatatatattagtaaagaagtatgttttttgaaccttcgataatggaagccacaaattattgttctaaaatgtgggtttcttatatttcgcatatgttcatttttataacaaggttttacttttaattttactgaattgtctatagacgccagtgctgttttgtagtcagttttcaagtaaatgttctataataatctttaaaataacggtcaatacaggtttaaaatttgaggaatgtccctattgtcggccttttgtgtgaatgccaactgcacttggaaatcagctgtcgcttgtttttgtttcgtgacataaccgcaatttactaaaacttagaaacttaacttaaattatttcatgaaaagcatagcaaactaatattaactatgtcccacaagtacacggagctgattaaggtcggcacgcagtatgctcgccggatgaactacctctcaaatcgcattttcggcgaagtggctcgcaccacaaacgagaagtccatgaaggtatgttctcgaaataaatttattaattaaaatgtaaacatgttttatccgaccttccccaggtggttcgcatgttctcggaggaaccaattcacaaacgggactacgtgatcaactggtatccgcggcacgtggagacgcacttgctgatgaagaaccttcgcgactacggactgttccgcgatgagcaccaggacttcaaggaggagatgaagcgtctgcgcaagctgcgcggcaaggcgcctcccaagaagggcgagggcaagcgggcctcaaagaagtagtaaaataaatattctaacatccacttttattgaaccaaagctagtctttttagttgcgagtcagcaacttggcgctgccggcgaacaccacctcgtcgttctgccttatatcgtactccacggtggaaatcttgcgagattgtagcagacgtacggtcaccacggtgtcggtctcaatacgacagggtttcagaaacttgaaattctgctctagaaccacggtgcccggaccagggagctgggtacccattataccagccaccaccgcgttgagcagggctccatggacgcggcgctcctcggtgggcgtttccagactatggatgtagttgtggtcgccggtgaactgggcaaactgctccaaatcgctttgggaaaaccgcttaaccacttgcacctgcttcactgctttgctgctcagctgtcggaacgtttggggaagccttttgcagctggacaacctctgtgcgtgttgcgaaatcttgcagcagcaactgacaaagtttaacgatgcgttcatcgtgggccttgacccgccactcttgcaccgtccttagcaccgcagggctcagaagtaaatcccgttcagtccgttcaccaaattccagtaattggtaaaagagcgccaggctgtgaagtactatttccgggtgatcagtgcgcacaaagaggccggttagcagttttagctgctctctgataaatttggcagccgttttgtctgcaataagaatatgatgaacaaggttggtttgaaaatcaaatgtttgcttacccaggcaaaggttacacaatgccgcaattccgtgcacttttaatagctgatcctgtgtctccagcgatgccacaaatacatccaaggcgtccgcctccaggagatgcgaccagttgatgggatcgtatgcaaaattggccaaattagcagtcacctgctgctgggcctctaataatgaaaatcaaaaatgaattcacaccggcaaaatgacgtgaataaaaacct

SEQ ID NO: 42557 - DNA, 342 bp, DROSOPHILA
atgtcccacaagtacacggagctgattaaggtcggcacgcagtatgctcgccggatgaactacctctcaaatcgcattttcggcgaagtggctcgcaccacaaacgagaagtccatgaaggtggttcgcatgttctcggaggaaccaattcacaaacgggactacgtgatcaactggtatccgcggcacgtggagacgcacttgctgatgaagaaccttcgcgactacggactgttccgcgatgagcaccaggacttcaaggaggagatgaagcgtctgcgcaagctgcgcggcaaggcgcctcccaagaagggcgagggcaagcgggcctcaaagaagtag

SEQ ID NO: 42558 - protein, 113 aa, DROSOPHILA
MSHKYTELIKVGTQYARRMNYLSNRIFGEVARTTNEKSMKVVRMFSEEPIHKRDYVINWYPRHVETHLLMKNLRDYGLFRDEHQDFKEEMKRLRKLRGKAPPKKGEGKRASKK

SEQ ID NO: 42559 - DNA, 3686 bp, DROSOPHILA
cttgcacctgcttcactgctttgctgctcagctgtcggaacgtttggggaagccttttgcagctggacaacctctgtgcgtgttgcgaaatcttgcagcagcaactgacaaagtttaacgatgcgttcatcgtgggccttgacccgccactcttgcaccgtccttagcaccgcagggctcagaagtaaatcccgttcagtccgttcaccaaattccagtaattggtaaaagagcgccaggctgtgaagtactatttccgggtgatcagtgcgcacaaagaggccggttagcagttttagctgctctctgataaatttggcagccgttttgtctgcaataagaatatgatgaacaaggttggtttgaaaatcaaatgtttgcttacccaggcaaaggttacacaatgccgcaattccgtgcacttttaatagctgatcctgtgtctccagcgatgccacaaatacatccaaggcgtccgcctccaggagatgcgaccagttgatgggatcgtatgcaaaattggccaaattagcagtcacctgctgctgggcctctaataatgaaaatcaaaaatgaattcacaccggcaaaatgacgtgaataaaaaccttaccgatgttggttgtcgtataatactcatcgaccaggtgaccaatgtactcccggcggtcaatgccctgggcaggcgtcctcctcttcaatgtcctgtggctggagaacataaaaaggatgcgaaggcaaagctgcgatttgaaatcagtcccaaaatgccattcacaacgcaaactattcatgttttaccattcacatataaacgtgctgaaatacattgggggcaaaataatagctttcggattcaaagccacatttataaaagttatttgtttcatctcatttttttttataatgagcaattgggttgttgtacaaaatcacacatgaatttatttgaaaacataataattttatttcgaaataatatatgacataaatattttttagaaaacgttaaacattttaatcaattccttttccaataagtacatttatacaagaagcgaaaaatacaatatttcaaagattaatttattaaaccaagtttagttctttaaaggtaaaccaccagcaaaacgtcctcattacgcaggctcctcctcctgacctgaagccttaactctcctccttgctgggactgtctttccccaagaactctgtgtcattggaattgctgaagtggctcctggcagctgcaactgactttggtgggatgttgaacagtgggtgggtaggcagtagctcgttaatggtgtcgcccaggacctgggggctgctggcgcactccgagtgctgggcaatggaaacgccactaagagtatagcatgtgtggtagagatcctgcggtctgaaaatatgggttttacattaaaaaacatcacaatgttggcattaatcccttactttccgggtttgtcgataagcccgccgctctgcttttggcagcagagcaggatgtactcctgcagggcctccacatcgaaaagggtgtgctccatttgcttatcgacgccggatagcgttgcctgcgtaatgggaatggtggctcccacccagaaggagtagcagccatcaaccagtttgttggtcctcccttggaagccgccttcgtaggtcatctgacggcgcagtgtccatttgagcaaagcctgcctgtcgcacttatcagcctcgttgagcagcgccaggcccgcgattccgcagaaggtgtagccaccatgggcctccagaccaggggctcctccaaatcctccctcgtatgtctgacactgggctatccagtcgccagtgccggcaaatagctccttgatcactggctcgggaagatttagcagctttgcgcaggagattgcgcagtaggcgccacgcacatccgtctcaccatccacgtggagccggaaggagccgtctgagtcacgtacactgaacaggaactggaccaaagtcggtcggtctatggcacggtacgcctgctcgcttccgatgatgcacagactgttcactgctgcataggtgggcgccagatgggcatactgtccaggtcctcctccaaaacccccagtcggcgaacggcagctatgaaagagtgattggagcattaaggatgcctattagagaaatatccttcaaagacgcacttgcttagaaactggaccacgtggttcaatgtctggtcgtcgaagttaaagctaagtagctgggccgcctgcaggatccagtaaacgcaccacgcgcgactgctgtccaggcactcgtaattggacggcagccgcctcagcatcgcgtccaggtagtactggtgctccagccggaagatctgggtgaggcgcgggtcggtgaacattatctgctcgaagcggtcgaagcatttctccaccgaactctccgtcttttgctgcaagtattcatcggctcttatcttttcctgggcgacattcggggattactcacttgctcgcgggatgtggtggtggacaccttctcgtcgtcgaagatgtagcttttcaggcgctggaagttgcggaacatcagctcctcctcggttcccatttctactccgagccggttaaattaaattaaataaactaaaaagatttgccgagcaggaattttaagcgaatggtttttgtttgtgtgatgtaaattcaacttgcaacactgctttttatttgattagggtattccctatacaaaaactcgatttattttcctttggctagatattaaaaaattttacattttaataattcattatttccaacattaaagccagtaatatacaattaaatatttataaaaagaccataaattcacatttaaaattcttaaaactcggttatcgatgtgacatcaaactttctgtggtgacgagattgtaggcggtggattgagaactggagtccaacataaatgtctcgggtgcatcgtcactagtccacaagccatacagttccataaatccatagacaaatagacacactataaaataggccgtcagagtggcgaaaacctgaaacacaattagcaataagatctgcaataattgtataatataaatttacattgttcgggcaccgacatcacaaactcacgaaaaagcttcctctgagaatcaggaacagccagcccttccaatccagcttgccgatccacgtgatgaggggttccgatcccgatgagacattttgtggactgggatcacctatggcaccgatttctccgccttccccccagctatcgctccttaaaggaagataccagtcgtaatagagctgcgttagcatgggcacctcaaatggcgattttttcttgattttcttctcgattgtgggttcaactgcgaccggctcggactgaccatcctgcaaatgctgaaagcagtcgttaaaatcggccagggttagcttacgcaaattgtcgcaatcatctgacttctcatgcttggaatggacaaagtgccttgttggcctggtatttttcttgtaaggaagcgctttgttggctttcggctcatgctgctaaacggtaagattaatttagtatataaaaataatagcttgatagaaatagaaaatataatagaaaaaatattactggcacactcaaatcgtgttccaataggccccggcgag

SEQ ID NO: 42560 - DNA, 1512 bp, DROSOPHILA
aaacaaaaaccattcgcttaaaattcctgctcggcaaatctttttagtttatttaatttaatttaaccggctcggagtagaaatgggaaccgaggaggagctgatgttccgcaacttccagcgcctgaaaagctacatcttcgacgacgagaaggtgtccaccaccacatcccgcgagcaacaaaagacggagagttcggtggagaaatgcttcgaccgcttcgagcagataatgttcaccgacccgcgcctcacccagatcttccggctggagcaccagtactacctggacgcgatgctgaggcggctgccgtccaattacgagtgcctggacagcagtcgcgcgtggtgcgtttactggatcctgcaggcggcccagctacttagctttaacttcgacgaccagacattgaaccacgtggtccagtttctaagcaactgccgttcgccgactgggggttttggaggaggacctggacagtatgcccatctggcgcccacctatgcagcagtgaacagtctgtgcatcatcggaagcgagcaggcgtaccgtgccatagaccgaccgactttggtccagttcctgttcagtgtacgtgactcagacggctccttccggctccacgtggatggtgagacggatgtgcgtggcgcctactgcgcaatctcctgcgcaaagctgctaaatcttcccgagccagtgatcaaggagctatttgccggcactggcgactggatagcccagtgtcagacatacgagggaggatttggaggagcccctggtctggaggcccatggtggctacaccttctgcggaatcgcgggcctggcgctgctcaacgaggctgataagtgcgacaggcaggctttgctcaaatggacactgcgccgtcagatgacctacgaaggcggcttccaagggaggaccaacaaactggttgatggctgctactccttctgggtgggagccaccattcccattacgcaggcaacgctatccggcgtcgataagcaaatggagcacacccttttcgatgtggaggccctgcaggagtacatcctgctctgctgccaaaagcagagcggcgggcttatcgacaaacccggaaaaccgcaggatctctaccacacatgctatactcttagtggcgtttccattgcccagcactcggagtgcgccagcagcccccaggtcctgggcgacaccattaacgagctactgcctacccacccactgttcaacatcccaccaaagtcagttgcagctgccaggagccacttcagcaattccaatgacacagagttcttggggaaagacagtcccagcaaggaggagagttaaggcttcaggtcaggaggaggagcctgcgtaatgaggacgttttgctggtggtttacctttaaagaactaaacttggtttaataaattaatctttgaaatattgtatttttcgcttcttgtataaatgtacttattggaaaaggaattgattaaaatgtttaacgttttct

SEQ ID NO: 42561 - protein, 419 aa, DROSOPHILA
MGTEEELMFRNFQRLKSYIFDDEKVSTTTSREQQKTESSVEKCFDRFEQIMFTDPRLTQIFRLEHQYYLDAMLRRLPSNYECLDSSRAWCVYWILQAAQLLSFNFDDQTLNHVVQFLSNCRSPTGGFGGGPGQYAHLAPTYAAVNSLCIIGSEQAYRAIDRPTLVQFLFSVRDSDGSFRLHVDGETDVRGAYCAISCAKLLNLPEPVIKELFAGTGDWIAQCQTYEGGFGGAPGLEAHGGYTFCGIAGLALLNEADKCDRQALLKWTLRRQMTYEGGFQGRTNKLVDGCYSFWVGATIPITQATLSGVDKQMEHTLFDVEALQEYILLCCQKQSGGLIDKPGKPQDLYHTCYTLSGVSIAQHSECASSPQVLGDTINELLPTHPLFNIPPKSVAAARSHFSNSNDTEFLGKDSPSKEES

SEQ ID NO: 42562 - DNA, 3099 bp, DROSOPHILA
agggcgaggctagacatctgcccaagtctatcgatcacatgcattacttatattttaagaccaaggagtccatcccggtccttctacaacaattttgcgacatcaagaaggagatatttcagattaacttgcagatgttgatgtcagcctcaagcacaccacctccgaagcttgagctaagcgcagcgatggaccgcctagctataagctctggctcacccagctcggatccatttgactctctacgcacgataaacgctatcgaagaggcagaaaggattaacaacatgtaagttaatacagaaaactgttaaaaatttactaataaatcatttgggttacagacttgttaatgaaatgaaaattgatcactattagtgtgcattctggtcgaccatacattttaatttgatttcaatcaaaccgcataaatatttctccattcgaaatcatacaaatgtgtatttcgattttttgttattgcccgcttatccaattaattagctttattagtttcatagaatctttaatgttctcatttggaaacgtttttttttttgtttagaaatatgtgttacgaacattgaaataaatgacaaaccttattttttactagctacgctttttcactggaaaacccaagtgtttacacgacttaatttatgttcgcggtatcgtgaaatagtgcacttgcatttgatctgatttccagatgtgtatgttactatatcaatacttgctatatattcaatccacagtagattatataattttatgacatatatatatgtatgtatatatatatatagacagaccgcttaatttctgaataaacagctgtatatagcttggcttggtcaattgaaatgaaacttgctgaggattgcaatgtcacgggaaattgcacatgcggcagaacagagaattagtcggcttttggccatgccagacgttgctataaaagaaaatcgaacaactgggcagccaccagaagccgaaagccagtgaccactgccagagcttcaaggagatcgcaaggaaacacaaaatgaaccaatactttttgacgggcttgcttttggtgctaggagtagtactacatatagactggacaacagccaaacctccggcgaaaaaggcggatcagctgcgtacgtaaatcaatttgtctttcttatatttttactaacaatcgcgtgagtatagtgatattttgaaacttaacaattatttaaatcggaataatgaaaaagtaaaattatattgttgtttcttccttttagcatcctttcttaaggtatgccatcgcaatgcacccgacctagacacctgtgttcgagaatcttatgaggaactacgtccaaggcttatggaaggtataccagagctatatatacctgccatggagccgctggttgttcctcaggtcaagatggaccaggactccggggccatatatttgcactcagtgtaccgaaatgtcaaagtcacaggcatctcaaagcacacggtcaatgagctgcgtctggagccttcaaagctcaagttcattttgtctctgaccttcccaaagctgcatatggaatcggactacagcattaaggtcagtagagaagtatgaatattgtcatttcaacaatttaaactaaattgacttaactaaaactgttatattattttagggaaaaattatgatgatgccacttttgggcgatggccactgtaaggtggatctcggtaagctaaaagagtcaagtctttacagtctatatatatttatttgtaatattcctgcagttaacatcaccatgcgaaccgagctgattggacaggagtacaaaaagaatggagccaactttttgaagatcaacactgtgaaggtcaagtacgagctatctgatgtccacattcatctggataaccttttcaacggggacaaagctttgggtgatcgcatgaacgagtttctcaacgagaactggaaggcactggccgaggaagtgcgtccgttgatgaccaaggcgctggtggacattttgagggcctccgtggataaattgtttgcttcttttagctacgatgatctgcttcccatgtaaaatatctagtgaagcccattttttttctatcttactgatttaatcgtagtacaaacagtagcctacaaattaagcagacagttaaaagcgaaataaattataaatataatacaaaaacggcggacgtggtcctgaagatcactaaaccagccacagtttggtgggcatcttggagaagacattgttccacagtccatgaaagatgtctgccagtcccagttccaggtctggacgcagctctgctatcacctccttgccgttttgattcagaaaggagttaatcgatgccgcgagaatttcgtttccgttgaatagattcttcaggtgtattctcatggcgcctacatcgaagccaaccttcatttcatcgatatggatgatctcgtcgcccgtgcgtgtctcgttccgtagagagatccttgtgtacacggttgtgtgtacgttcttcagcgccatagccacgtctccactgcccacaaggggcaaaagtaggatatttcccttcaggttgtacttcgcccggatcctaagccttggaagttccagctcgaaatttagcaatcgccgctccagatccaagctagagagtaacggagcgaaatgagtgtgtttgttagtagctatttggtgctatttgtgagttatatttaattacctggctcgtcgcacagtcgcgttggacggccctcggatgaccaggtcttgaaatcctccggatagcaccaggttgccgctgcccttggataccgacacctggtcaatgtttaggggctcaaaactctttactccgatctccggaatgccagcggctagtgccggaaagcatccctcgaagagctgccgaaagcacttgtcctcgttcggattagagcgtttgcacgtctgcagccacgaggctgcgaggaaaggtttggtttatacatttgatttccaaaattaggtctttcgatacatgttaactttaaatatagactcaaatttactacttagtttgctttat

SEQ ID NO: 42563 - DNA, 828 bp, DROSOPHILA
gccagtgaccactgccagagcttcaaggagatcgcaaggaaacacaaaatgaaccaatactttttgacgggcttgcttttggtgctaggagtagtactacatatagactggacaacagccaaacctccggcgaaaaaggcggatcagctgccatcctttcttaaggtatgccatcgcaatgcacccgacctagacacctgtgttcgagaatcttatgaggaactacgtccaaggcttatggaaggtataccagagctatatatacctgccatggagccgctggttgttcctcaggtcaagatggaccaggactccggggccatatatttgcactcagtgtaccgaaatgtcaaagtcacaggcatctcaaagcacacggtcaatgagctgcgtctggagccttcaaagctcaagttcattttgtctctgaccttcccaaagctgcatatggaatcggactacagcattaagggaaaaattatgatgatgccacttttgggcgatggccactgtaaggtggatctcgttaacatcaccatgcgaaccgagctgattggacaggagtacaaaaagaatggagccaactttttgaagatcaacactgtgaaggtcaagtacgagctatctgatgtccacattcatctggataaccttttcaacggggacaaagctttgggtgatcgcatgaacgagtttctcaacgagaactggaaggcactggccgaggaagtgcgtccgttgatgaccaaggcgctggtggacattttgagggcctccgtggataaattgtttgcttcttttagctacgatgatctgcttcccatgtaa

SEQ ID NO: 42564 - protein, 259 aa, DROSOPHILA
MNQYFLTGLLLVLGVVLHIDWTTAKPPAKKADQLPSFLKVCHRNAPDLDTCVRESYEELRPRLMEGIPELYIPAMEPLVVPQVKMDQDSGAIYLHSVYRNVKVTGISKHTVNELRLEPSKLKFILSLTFPKLHMESDYSIKGKIMMMPLLGDGHCKVDLVNITMRTELIGQEYKKNGANFLKINTVKVKYELSDVHIHLDNLFNGDKALGDRMNEFLNENWKALAEEVRPLMTKALVDILRASVDKLFASFSYDDLLPM

SEQ ID NO: 42565 - DNA, 7335 bp, DROSOPHILA
ggaaatgtaagcaaacggttctgttaaggatattttgtgaaaagcaatattgggaaattcagaaagcttaacattgaaaaattctctttaagaataagtctgtaatgtaaataacagtaatgtaatttaacatttttctttaaataacataactgttactgcaaacataaaatattatgttatacccaaaaaaagggaaatgcattagaaccgaatgcaattattataagaacaaccattgttgcagttactatatatttacagtatacttgtttttctttaatgttgttaaatgagtatttataatctaacaaatctgtaaagttcttgaaagttaattgtgttaaaatggagtggcaatagtaacatccatttggcattcgatactttggcttttgtggttaaaacaaattaagtggaattaatttgactttgcctggcttttcacctgtgcatcggcacactcgctcgcacactcaaccgtgtgtttgtgcttgtgcatttatgatttcggaaaaaggcctcggaaaagtaagtctggaacaggctttgtttgtactgctcgttttgctgtctcgctgtttctgacatttcgagtggttttctccccccgccccccatgcattaaatattcatcatggaaaaagcactggcaagtggataaggtagaataaaaaaaaaaaatgggagagcccaatacgtatagccacatatatccatataggatatgtttatggtaatttatactccggtgcggagattgaaattcatgtaaataaattgcacctgtaaaaataattaaagttgaaatcgctcgctggctggctaaaatatgaactccacctttcacttgccagtgcataaatttactcgttcgcatacccatttatatctgggctgcgatatatacggtagggctacttgttatttgttatatagtggcaagcaacaaaaaaaattggaataaaataaaaagaaaaagaaaactttccgccagacgatggagcactcgaagttgtgggaccttcgtcccgaagtgcgggaacgtcgcttcaagtggacttcagacggccagcaacaacaacaacaacaattggggtggtgcaataacaaggacgatccacgtgcaaaaaattcttttgctatttttcaatgggggtgacctgctcctcccaggtgcgacgccaacaaatatttttataatttccttttcgtggaaatttgcatttttctgttgcgttgcgttgtgttgtgcctgccatttccgctttgcgctttgccactttgccatttccggttttgacggctcggcgggaatttctattccttagccataattgcaaagttcccgctcctgcggctccttggggcctcagctcatcccacaggctgtccgcaaacaattccgagtgattttcaatgtgtatgtgaatgaaattaagcaattccaatttacctaaggtcctttcccgcatcactgagttcacgtaatgatttcgcaaatgcaatagcaagaaaattgtttgagacttatggaactcatttgaacaacaccaacaaataattactggttggtttattaagaggccttcaaattacggaatttcagttaactgtagcaaatatgaacttgaacatctatttaagaattaaagccgaattcgctacatgcatacaaccagacaacttgctattcataacaacacccgttgacaattgattacgcattactacaatttaattattaacattaatatatcaatttgtatttaattcatccttcctgtgaaacagaaatttatttgtcatttattaaatctttaataattggcacggtctctgtgtcaagccaacaagcctaattaacatttaaaattatcagctgacataaattgtttgatgaccataaatatttgtgccgacgagcggaggcagaaaactttgcagacaaggcaatatgaaaagcacaaaaggacaataagggtcccagttccgattgccgttttccccttgccacaaaaacagaaagagagggcaacggatagcgcagtaaagagacggcagcgaataaaaaacaaatatatcaaagcgagcaaggggcataaatgtagcgtaatttaaataaaattgcattaatatgttctctccaccgaaagggatctccagctgcagcctgtgtcctgggcaaatttccaaccaagagaagagctattcgtgccttccccggatctgccggccataattcatctgggaggcaacaaaaacacacacaatcacacaccacacaactatcgccggacctctgttgctcagcaaattcacaccaaaaatcaaaaagcaataatgatgctcgaaatctgaacagccgggtccgggtccgggctcgagttcgggttgtgcctggcgagatgcggatgggaggtgtgaaaagtgggcatgtctgggccactataaatgcatgagtgtgtgtttgggctacgtggcaaacttttcgagtatttgtcgttataaatttgacatcaattgccacggcatgtgaccaacgaaggtctgacagtccaggaacaagccaggcggttccagaggtggacggactacggctgaaggaacgaaaaggcggtgaggcactgctgaggatgtgagccaaattgcgaaaaaaaacaaggctcgatttagatatggaaggagtaaatttaaaaggaaaaatatttaataaggagtatactgccaaccaaaaccctttttactcctacaattttattcgagtaactcgactatcagataccgactaagtcggtacgcttgtgagatcgcaagcaagcaagtaaaatttttttggcatatgaacagaaattctcacataaaaaaataaaaataatataaaaaaatcaaataaacttacataagtgtggaactgttttcattcattattatttcactctagggaatcatataattacaagactaatttgttattggtcacagcggatttatgaattttttcttttgcttgttaagagcaaatcatgtttccagtcaattcagttcagtttaaagattgacccagactacatcgtaccatgtcgagtaaaataatatttctgttttttcttttttttattcaacaccctacagacattaactgttccaacggattgggcaatattagagaggactactgtgaaatatatttggatgaacttggcgaaaacggaacatgctcaatagctaataatgaagtaaccactgaagattatcaaatgaaattagtttttcttaagctagaaatcaattggacaagtccagtgtttcacggctggaatattttcaaaatatgtaatgaaactgattacgaacttgttataatttctgtgcttggaattcgaagtgaagtcgatatgagaataagccctgcggtacaatacctaagcctacttggcattcgagaaattagtggttacgatatttaccttccatccgtgctgataactgagatggatgtacatcacgcaaatggaccgaaaatggtaacttttaaatatttatatgacagtacagtcaattctgtgattacaaacaattacattcggaagaccatgaacaacaccgagaaaatcaaaatttattatcataatacttttgaaaaaacaacactaacaatggagaaaaatatttttcatggcaaaaataaaatgagtgcattaatatttaatggtttaaaaataaaaggtttaacgaataacacctttgaaaatttaacaagtttgaatacccttattttcgataatgtctttctaaaagatctttcgtttttgaggttagtaaaatagagtctcggttatcttacgttaatttctgcctgcatttcagatcttctacgcttcagtcatcattaacatattgcattatgaaggttgataatatggtagatttaaagagcttcgaaaaattcacgaatcttgaaattatagaagtgagccaatacaaaggatttaaaaattttactgctttcatatgtgaaccatataaaagtcactgtaaatttacattaggaattaatgaagttgcatgccccttaaaatgcaattgctcatataatcgagacaagtcacagttagaaattgattgttggcagaaaaatctaacgactattccatcgctaccggtaccgaaaaaaggaagttcagctctggtctttcagagcaacctgttggctgaactccccgataattctttggagggctatcataacttaaaaagcttggacgtgtcatacaaccaactaactagtctaagcgtaagccaactgcctgaaagtcttcactatcttgacatcagacataataagattactactctaagcccacaggttgttgaatatctatacagtgttaatgttttcaaccagtatggcaacaaatggagtatctattgcgatgaataccacctacaagaattcttttggtataaagcaaaattgttacggataaaaacatccaaatttcagacaataatggaatatattgaattaagttcaaaaggctcatttgtggaaaatttttttgttcagaatatagatcaattatacctagaagcaaatgaagatgaaataatagacgcctttggcccttcggataaatactttaatttaaagttaatggaagctttaaatcacgccatttggttgttttctggggagttcgatgaaattattctccaccatctcaactcgccctgcccttacaggtgctcttgttgtttcgaatggcatacaggtgaattcctcataaattgccggaatttgtctcttgacatttatccaaggctgccgaactcgattccgtacaagacgaccttatatcttgatagaaatgaaataagaaaactaactaataccgaatctttagtcgttgctggtcatgcatcgatacataaattgcatatgtcccaaaacctgttaagagaacttccgcttcacctgctcccagaaaatataacggtacctcgacgtacgcaataatctattaaagtatctggatgatggtgtgatagccttccttgaatatcgagaaaacattactaagatagaactttctgggaacccatgggaatgtaattgcaaggcaaaggccttcctatcttttctcagaaggcacgagccgatggaatacgaaacagtcctgcgccgcgttgaaataactgatgataagtgtcctgaagactgcatttgctgcgtcgacacctcaaattccgactcgctcgcatatgtggtcgactgcagtggaaaggagctaagcgaaataccacaattacctacaccaacatatgggcaaacaacgctcgtgtttgaaaggaatagtctcaagaaatggccatccagcttgctaccaggatactcaagtgtgacacgattttatttggcccacaatagactttccgatattgatcaactaccagacaaacttgaatatctggacatcagtaacaataatttctctgctctcgacgatcgagtacgtggatttcttcagaaaagaatgaattcttcccagctgcaactttccctcttcggaaatccgtggacttgcagatgtgaagataaggacttcctggtattcgtaaaggagcaagcgaaaaatatcgcaaacgcttcagctattcaatgtattgatacaggaagatcgttgatcgaagtcgaagagactgatatatgcccctcggtcctcatctactacacctccctcgccgtctctttgctgatcatcgccttgtcaattaacgtctttatctgcttcaggcaacccataatgatctggttctacgaacacgaaatatgcctcagcttggccgcccgacgggaactcgacgaggataagaaatacgatgcattcctatcattcacccacaaggacgaggatcttatcgaagagttcgtggatcgactggagaacggcaggcacaagtttaggctatgcttctacctgcgagattggctggtgggggagtccattcccgattgcattaaccaatctgtcaagggctcaaggcgcattatcatcctgatgacgaagaacttcctgaagtccacctggggtcgcctcgagttcagactggcgctgcatgcaacatcgagggatcggtgcaagcgattgatcgttgtcctttatcctgatgttgaacatttcgatgatctagatagcgagttgagggcgtacatggtgcttaatacctacctggatagaaataatccaaacttctggaacaagctaatgtattcgatgccgcatgccagccatttgaagagaagtcgctcagatgcagaaacaaaggtataggaacaaaatattcaacatatattattaaaaatatataaaatatataaatataaaatataatatatatatataaaatattatcgatcaaatctgacatatctagtatagtatccatactttgtatataaataaataattgcaataaatatactcttgcaaaatataaaagttaaaaaaagtattgaattttgtataacaaagcctaaaatactgagtttagaaaattgaaagaagtaaaaattcaattttggcggcttctactagcttttacaagctcagttgtgcagaactcaaaatatatggtatccctaaataattcagtgaactagtaaaaatgttccgaagctctgtattcagccctgaaccaatagaatttcacctcaggaagagttttcaaaaaataaaaaataaaaaataaaaaaaaaaaacacaggtcttatattaggtcttcaagtttggcccgaaatcacaattttatattttatttaatttttctgaatagtgtagtttttatatacaaaaaagaaaggaaataaaacatagttttaaaaggggttgaaaactttaaaacatttaattctgtatagtaattttatttttaaagacttcaaagataaacctgcgtgtatttatacattttacacattacttgcaaatatacttttgaaaaagctttcttagaagcttatatagatttagcaaatatttaaactcataagcaagtgtagagcttaaaaatggtgtaaaattgtgaatgtaaatttgcgttgctattttaaactaggcattaatcaatttaatttttcttctgttaatgatttacatttttaaacacattttcataaaatcataaaaaatgtatagattttatattagacaggtaaagataattcttatacgaattgattacatgcttatgtcttacatgtaagtctaaaatccccaatcactgcaagttgcgcattaacgagaatttccgagagctaatgatgtgtgaaat

SEQ ID NO: 42566 - DNA, 3348 bp, DROSOPHILA
atggagcactcgaagttgtgggaccttcgtcccgaagtgcgggaacgtcgcttcaagtggacttcagacggccagcaacaacaacaacaacaattggggtggtgcaataacaaggacgatccaccaaattcacaccaaaaatcaaaaagcaataatgatgctcgaaatctgaacagccgggtccgggtccgggctcgagttcgggttgtgcctggcgagatgcggatgggagacattaactgttccaacggattgggcaatattagagaggactactgtgaaatatatttggatgaacttggcgaaaacggaacatgctcaatagctaataatgaagtaaccactgaagattatcaaatgaaattagtttttcttaagctagaaatcaattggacaagtccagtgtttcacggctggaatattttcaaaatatgtaatgaaactgattacgaacttgttataatttctgtgcttggaattcgaagtgaagtcgatatgagaataagccctgcggtacaatacctaagcctacttggcattcgagaaattagtggttacgatatttaccttccatccgtgctgataactgagatggatgtacatcacgcaaatggaccgaaaatggtaacttttaaatatttatatgacagtacagtcaattctgtgattacaaacaattacattcggaagaccatgaacaacaccgagaaaatcaaaatttattatcataatacttttgaaaaaacaacactaacaatggagaaaaatatttttcatggcaaaaataaaatgagtgcattaatatttaatggtttaaaaataaaaggtttaacgaataacacctttgaaaatttaacaagtttgaatacccttattttcgataatgtctttctaaaagatctttcgtttttgagatcttctacgcttcagtcatcattaacatattgcattatgaaggttgataatatggtagatttaaagagcttcgaaaaattcacgaatcttgaaattatagaagtgagccaatacaaaggatttaaaaattttactgctttcatatgtgaaccatataaaagtcactgtaaatttacattaggaattaatgaagttgcatgccccttaaaatgcaattgctcatataatcgagacaagtcacagttagaaattgattgttggcagaaaaatctaacgactattccatcgctaccggtaccgaaaaaaggaagttcagctctggtctttcagagcaacctgttggctgaactccccgataattctttggagggctatcataacttaaaaagcttggacgtgtcatacaaccaactaactagtctaagcgtaagccaactgcctgaaagtcttcactatcttgacatcagacataataagattactactctaagcccacaggttgttgaatatctatacagtgttaatgttttcaaccagtatggcaacaaatggagtatctattgcgatgaataccacctacaagaattcttttggtataaagcaaaattgttacggataaaaacatccaaatttcagacaataatggaatatattgaattaagttcaaaaggctcatttgtggaaaatttttttgttcagaatatagatcaattatacctagaagcaaatgaagatgaaataatagacgcctttggcccttcggataaatactttaatttaaagttaatggaagctttaaatcacgccatttggttgttttctggggagttcgatgaaattattctccaccatctcaactcgccctgcccttacaggtgctcttgttgtttcgaatggcatacaggtgaattcctcataaattgccggaatttgtctcttgacatttatccaaggctgccgaactcgattccgtacaagacgaccttatatcttgatagaaatgaaataagaaaactaactaataccgaatctttagtcgttgctggtcatgcatcgatacataaattgcatatgtcccaaaacctgttaagagaacttccgcttcacctgctcccagaaaatataacgtatctggatgatggtgtgatagccttccttgaatatcgagaaaacattactaagatagaactttctgggaacccatgggaatgtaattgcaaggcaaaggccttcctatcttttctcagaaggcacgagccgatggaatacgaaacagtcctgcgccgcgttgaaataactgatgataagtgtcctgaagactgcatttgctgcgtcgacacctcaaattccgactcgctcgcatatgtggtcgactgcagtggaaaggagctaagcgaaataccacaattacctacaccaacatatgggcaaacaacgctcgtgtttgaaaggaatagtctcaagaaatggccatccagcttgctaccaggatactcaagtgtgacacgattttatttggcccacaatagactttccgatattgatcaactaccagacaaacttgaatatctggacatcagtaacaataatttctctgctctcgacgatcgagtacgtggatttcttcagaaaagaatgaattcttcccagctgcaactttccctcttcggaaatccgtggacttgcagatgtgaagataaggacttcctggtattcgtaaaggagcaagcgaaaaatatcgcaaacgcttcagctattcaatgtattgatacaggaagatcgttgatcgaagtcgaagagactgatatatgcccctcggtcctcatctactacacctccctcgccgtctctttgctgatcatcgccttgtcaattaacgtctttatctgcttcaggcaacccataatgatctggttctacgaacacgaaatatgcctcagcttggccgcccgacgggaactcgacgaggataagaaatacgatgcattcctatcattcacccacaaggacgaggatcttatcgaagagttcgtggatcgactggagaacggcaggcacaagtttaggctatgcttctacctgcgagattggctggtgggggagtccattcccgattgcattaaccaatctgtcaagggctcaaggcgcattatcatcctgatgacgaagaacttcctgaagtccacctggggtcgcctcgagttcagactggcgctgcatgcaacatcgagggatcggtgcaagcgattgatcgttgtcctttatcctgatgttgaacatttcgatgatctagatagcgagttgagggcgtacatggtgcttaatacctacctggatagaaataatccaaacttctggaacaagctaatgtattcgatgccgcatgccagccatttgaagagaagtcgctcagatgcagaaacaaaggtatag

SEQ ID NO: 42567 - protein, 1115 aa, DROSOPHILA
MEHSKLWDLRPEVRERRFKWTSDGQQQQQQQLGWCNNKDDPPNSHQKSKSNNDARNLNSRVRVRARVRVVPGEMRMGDINCSNGLGNIREDYCEIYLDELGENGTCSIANNEVTTEDYQMKLVFLKLEINWTSPVFHGWNIFKICNETDYELVIISVLGIRSEVDMRISPAVQYLSLLGIREISGYDIYLPSVLITEMDVHHANGPKMVTFKYLYDSTVNSVITNNYIRKTMNNTEKIKIYYHNTFEKTTLTMEKNIFHGKNKMSALIFNGLKIKGLTNNTFENLTSLNTLIFDNVFLKDLSFLRSSTLQSSLTYCIMKVDNMVDLKSFEKFTNLEIIEVSQYKGFKNFTAFICEPYKSHCKFTLGINEVACPLKCNCSYNRDKSQLEIDCWQKNLTTIPSLPVPKKGSSALVFQSNLLAELPDNSLEGYHNLKSLDVSYNQLTSLSVSQLPESLHYLDIRHNKITTLSPQVVEYLYSVNVFNQYGNKWSIYCDEYHLQEFFWYKAKLLRIKTSKFQTIMEYIELSSKGSFVENFFVQNIDQLYLEANEDEIIDAFGPSDKYFNLKLMEALNHAIWLFSGEFDEIILHHLNSPCPYRCSCCFEWHTGEFLINCRNLSLDIYPRLPNSIPYKTTLYLDRNEIRKLTNTESLVVAGHASIHKLHMSQNLLRELPLHLLPENITYLDDGVIAFLEYRENITKIELSGNPWECNCKAKAFLSFLRRHEPMEYETVLRRVEITDDKCPEDCICCVDTSNSDSLAYVVDCSGKELSEIPQLPTPTYGQTTLVFERNSLKKWPSSLLPGYSSVTRFYLAHNRLSDIDQLPDKLEYLDISNNNFSALDDRVRGFLQKRMNSSQLQLSLFGNPWTCRCEDKDFLVFVKEQAKNIANASAIQCIDTGRSLIEVEETDICPSVLIYYTSLAVSLLIIALSINVFICFRQPIMIWFYEHEICLSLAARRELDEDKKYDAFLSFTHKDEDLIEEFVDRLENGRHKFRLCFYLRDWLVGESIPDCINQSVKGSRRIIILMTKNFLKSTWGRLEFRLALHATSRDRCKRLIVVLYPDVEHFDDLDSELRAYMVLNTYLDRNNPNFWNKLMYSMPHASHLKRSRSDAETKV

SEQ ID NO: 42568 - DNA, 2563 bp, DROSOPHILA
actccgctgggctggacttaacttcccccttcaattatgcgcagtcagacgagctacgagtccttagcactgaccaaaaaattctgactataaccattcaaaaatgtaataaaaaagggaggataatttcagcgataaacttccggtttctggtaccatttaaattcaattaagtggaatattacaaggtaaagattctgatgtcaagctatttttttttaataatgacatcaagcttaaaaaggaatatatgttgctaagcgaactagcttaggatggcaataatttgtttataaaaattctatttacaatcaaatttggtaacattatattcgaagtagctatgttttttttctgcctgtagcccttcaacttttaatggatcgatatttcgtgatgttccgctgaccaactgccaaagtttagaacgcgattccctggccattccgaaatgtaaatgccgagcgaaaagtgttccacgaatgcgtattttattttaagtacgaattccagcaaacaaagccattcgatggcggctggcgaagaggcacttaaggagcgggtcgaggtccagaaaattaaaagcattccgccaggctcctccattttattgcggataaaaggttgaattcgagggccgggccataatagcaatcacaatcgtaaaacgggctgcaagtacatacgagtatagtcgtgtgatatagcaacccattgtggaaaccttgtatgaatgagtccgtgtatccggtgatgtgtagacaaggcatccagacattcagacagccagtacatcgtcacagcaattatacaaatttatggaccattatcaacatgacacaaaatttggcccacaagccacacttggctctactggctccattcaagcgtggagcgataaaagctgggacatttgcgcaagcgtagggagcagcacccacggtaacctcgagactgactcatcgaaaactgatgggccgtaaataacgtacatagcgacttaatacggggattcctcttattggttttgctttaacagaatttcacttaggtttttaggacagtttacgaagcaatgggtagatccaattgggctgctggtagtggtattcttatcttgtgctcacaacagcctcctttcgcgccgcatcctggagcagctgggtgtccacctcgtcgcccggcagctgcacgtatcgcaccacggagccacggatgaagcagttcttgacgctcagcatgtgggggtacttgtccggatctgtgacactgatatccgtcagcttgatgttcaggtactgatccaccgagtgcagggtgccacatatgctgtttaattataaagaaagtattaaaaattcctcaatttaccggcaaataaacgaatctcacctgaggtcgtttttcaactccacaacgacttccttgcccaccagcgacttgaagaaggagtaaaagagctgcagattacataaagcgttaatgttaattcttaaattcacagttatttcggttttgtaccattgttattgtttattgcaatttcgacgaacgcgttgtttttttttagagatgtgcactgtaaaaataaaaaactatcgatcgctgttttaaaaaatacatatcgatacatttcatgtgtgattgtgagtaacgatattctattaacatttggcttataaatattactttcataaaatttgatcaaaaattaatgtatattaaatctttaaactgtgtggcttaaaaggaattaagcagtagctgagctgccatctgttaattatttctatccatgtggcaacgctttgtcgtcgctattggtcgagtttcataaaagccagctttgtacgggcagcattttggcgggcaaaaaaatatggtttttaaataatatatttcggtcaatttatgaagctttactaaggcattcatagtattcacaaaaaaaaggtgtatatattcgcagtcgagtaaatacagtaaacgcaataagttttctttttagttattgtgctctttatttattatcaagcatcaacgcatcttaaatggatttttcgataatacggcaaataaaaaatttaaaataaattaggctgtgtaaataaatacgaaataaataaataaatattcttacaattatataaaaaaaaaattaattttttaaaataagagacgatattaccgataaaagacgaaggataaaaaataagaaataaaggaaaatcatgcgaaataaaaatattaacaatcgcaagtcaatcccaacccatttaaaatattgaacgcatccgttaattcgaagataagatccacagacatttgcaagaattcggttaagatgtatattttaggggaacagattaaattgcacttgctaatacaattattgacttttaaattacatttaataacaattttctcgggtggttaaaactatttacaaacataagagggcgcattgaccactttgccatttctcaaggagttatacatttttttttttggtttgcctctagagtctataccaacaaaaagatgtgctgcccgccccgttttt

SEQ ID NO: 42569 - DNA, 439 bp, DROSOPHILA
aaaacaacgcgttcgtcgaaattgcaataaacaataacaatgctcttttactccttcttcaagtcgctggtgggcaaggaagtcgttgtggagttgaaaaacgacctcagcatatgtggcaccctgcactcggtggatcagtacctgaacatcaagctgacggatatcagtgtcacagatccggacaagtacccccacatgctgagcgtcaagaactgcttcatccgtggctccgtggtgcgatacgtgcagctgccgggcgacgaggtggacacccagctgctccaggatgcggcgcgaaaggaggctgttgtgagcacaagataagaataccactaccagcagcccaattggatctacccattgcttcgtaaactgtcctaaaaacctaagtgaaattctgttaaagcaaaaccaataagaggaatccccgtattaa

SEQ ID NO: 42570 - protein, 95 aa, DROSOPHILA
MLFYSFFKSLVGKEVVVELKNDLSICGTLHSVDQYLNIKLTDISVTDPDKYPHMLSVKNCFIRGSVVRYVQLPGDEVDTQLLQDAARKEAVVSTR

SEQ ID NO: 42571 - DNA, 4635 bp, DROSOPHILA
ttggtgctgaaccaatgtacatacattgtcctcgatgaagccgatcgtatgatagacatgggcttcgagccagatgttcaaaagatcttggagtacatgcccgtcaccaacctgaagcccgataccgaggaggctgaggacgaaacaaagctgatggagaacttctacactaagaagaagtaccgccaaaccgtgatgtttacggcaacgatgcctccggctgtggaaagattagctcgcacatatctccggcgaccggcaacggtttacatcggatctgttggcaagccgacagagagaacagagcaaatagtgtacatgatgggcgagaacgacaagcgcaagaagcttatggagattctttcgaggaaaatcgatccaccagttattatctttgttaatcaaaagaagggcgccgatgttttggctaagggtctggagaaactcggctacaactcgtgcacattgcacggtggcaagggtcaggagcagagagagtatgctttggctgctttgaagtcaggcgcaaaggacatcctggtggccaccgacgtcgctggtcgtggtatcgacatcaaggacgtgtccttggttattaactatgacatggccaagaccatcgaggattacacacatcgtatcggtcgtacgggtcgtgccggcaaaaccggttgtgccatttcgtttgtcaccaaggacgatagcgctttgttctacgatctaaagcaatgtgtgtctgcaagtcctgtctcgacctgtccgccggagctaatgaatcacccggaagcgcagcacaagcctggcacggtggttaccaaaaagcgcagggaggaaaaaatattcgcctaaatttggcaaattctaagcagaactactttaggttaaaatttaaaactaataaagttgggtgcgccaaagccataccttggcaaccaaaaattctctttcgaaatagtcttttgaaactttagattcataaaccatttatttgaaaaaagtctcatctttgtaatctcaaaaagaaggcatttctgctctgtttcgagtccagaggcagatacttgtcataaaagtccaagatgatttcctccatcttaaatccgaatttctggtacaacatgacggccgcgttggtggcggaaacgtgcaacgttatgtccttggacatacatgtctggataaggtgatataacatgaagctggcgatgccactgcgttgccagcacggccgcaccgccatgaatgagatgtaggcctcgttgtaacctacgtcgggcactaggaatccgcaaccgatgaccagtttcttgtacaacgccactacactgtagtccgggtagctcaaacactcgcttactaaaagggaaaaaatcatacaaatttgtacattaaaaaagctaaaaagaaaatcatgaaacccaccatcaatgtttggccaaaaagtactttggagtaatgcgtttacggccggaatatgctgcggtctcacaaaacagaagtcgatggtagatcttgtgggatgagatccgtttactctatgctgcagctcgcacataagcttcagccatggaggagccatcgtttcgctccgaaagataaatggatgaagaactctttgagagtagggcgattcaaagagctcgtattgagtgcatcccgccaggcgggcgtgaaaggagctccttgcatcttgtcgtgaatgggctaacaactgatatctgtcaagaatttcggccttctgatgacccagcatctttaggcgtgctcttcccaggggatctatgtgctcgtccaagttaaatatgtgtcgattgtggtcccttttccattttcgaagagaaagttttcgatataggcgccgcacataggcaggtatggatatgtggcactgatgctccagtgcgaatattctatcgagtcgctggtacaacttctgttcttcgtatgcatttattagtttgagattttcgctaggaatggccatgtcatcgggatcctgcgcctcctgcaaccagggccaatttcgccgtggttgtctgacaaatccactcggtttgcaaggctctaggatagaggatttgctatttgtcgtgacgtcatcatcttgcattatctcttctagtggttcctctttgatgctttcgtttgcctcttgcgcctggtaatttgtaacctgtacgatgcgtggctgatagtcgggtgattcgtcctcttctggcttttcatcttctacctcgccttctttttgttcctcgctgctttcggctgcaggttcttctgttgatatgggtttggtctcatcagcggtatttggtatggcaaaatttgtatccatgtcgaaaagaccttcattattcaaaggtgcgtgaagcaacggctcggtcatgaagaaatcatttttacccgctccaatcaggggtgggggcattatgcctggtaggttaccaaacatggtaaaatcatcgctttccaaactttcagccagaaaatccatcaggcctgcttggaccatgctcataggctgattctgtggttcttcctccttctgacttggtggcgctatattttcttgaagaattggtggccctggaagcgtttcctgtgacaagggtgaaggttgtgtttgtatctttggcaaacggcccatgtagggactggaataaaagtgaaagattttaatgaaaggaacgcatagttgtattcaaaattaattatcttacattgttcgcgcacagccctctgttgaactgggtttctcagcttctgctttaataagcggtgggttatcctgggcatgatccgccactgagatctcgctgctacagctggtctcgtccgctgcaggcaaccgcttttcaatacgcatttgtagccgcaactgttgctttttctcatctgaaatgtgacgacttgtgaaatctatcatatcattaacttaagtggcacttacattctttgagaacgcttcttggggtttgaaagggcttggccagtttccaccagccgttctcctgaaagacatccagaccagactgaaagtactccggactgttgtgggacagtgcgccggatacggaaccagtccattgcttgcgacgccgcctgaacaaggggaataaattgaatgtgttctccggaaattattcatttacgaatacttacacattgggaccgaatatatagttccagttcttgtccacaaaactgatgatgtgcgtgcgccaatggaagaatccatggtgtcccaagcccttttgtttgatggacagattgtagagcgttagggtgagcaccagcagccaaggtatcctttggcgcacgatcacttccttaatgggttctagatctgagggtatgaccgattccttagctttatccagcacacacttgacgcacgtgaactcgaagaaaacgtcgcctaaaagatctccgggcgtgcaagcatgcggcaggcatttgatgtgaaccatccgcctgcattcctggcactccaggtagttgtcgtcctccaccggcgattcacagtagcggcatggtccctggggatcatcccagttactgggccgattcatttactcagtaaaacagcacaaattgcaagttaaaaacaatcaacaaaataatgtgttgtttgtgtgttaccgtttcgcactttttggtttataccatatatatgagaagcttacattttgaaaataccaaaaaatcgcactgtgctcggttcaaatttgtcaataatttgaattgggaaaacaaaaaataaaattaatttgtattcttaattgatcttttctgaagcactacaaaacatattattattaagcacttatttatttattaacattgccgttttaaaatgccgaagatgtcagcattaacataatttaaaataattttttattgttaaaatgtcataaataagcatttttaattaatatggaacagagacaaggctatggtcttcgcatattatataccctcttctcaggtgtattcaacattttcttgtcacatttttagaaattgcaagcaaatatcaaaacactttttaaaagttttgagctcttggtgggcgttagagtgggcgtggcattcttctgaaacaaactgtgatgcgtctacatgtctagaatctgattgctccatcttagcttcctaacttttaagttcccgagatcacagcgcttatacggacgaacagaaggacacgttttaatcgactcgtccactgatcctgattacatatatatgcttaatactgtcgggaatgactttttcttttgttatttcttatgccagttacctacttttcaacgaatctagcatatccttatgcccttatatacactatataaaagatcccgattgttttttatgttctccctatctagaagataagaatccgcttgattagtacagtcccgtttcgcttgatcaagcatgcgtttgtcacgccctacgcccaccaagcacattagtaccaacgcccaccacccaccacccaacgcccagcgtcctttggccatgcaacgaaaatgacattaatgggctctttacggcttacgcataattaaggctgtttccggcagaccatcgaccatcggacctggccccattgcttttggcccggtcagt

SEQ ID NO: 42572 - DNA, 2388 bp, DROSOPHILA
acaaacaacacattattttgttgattgtttttaacttgcaatttgtgctgttttactgagtaaatgaatcggcccagtaactgggatgatccccagggaccatgccgctactgtgaatcgccggtggaggacgacaactacctggagtgccaggaatgcaggcggatggttcacatcaaatgcctgccgcatgcttgcacgcccggagatcttttaggcgacgttttcttcgagttcacgtgcgtcaagtgtgtgctggataaagctaaggaatcggtcataccctcagatctagaacccattaaggaagtgatcgtgcgccaaaggataccttggctgctggtgctcaccctaacgctctacaatctgtccatcaaacaaaagggcttgggacaccatggattcttccattggcgcacgcacatcatcagttttgtggacaagaactggaactatatattcggtcccaatgtgcggcgtcgcaagcaatggactggttccgtatccggcgcactgtcccacaacagtccggagtactttcagtctggtctggatgtctttcaggagaacggctggtggaaactggccaagccctttcaaaccccaagaagcgttctcaaagaatatgagaaaaagcaacagttgcggctacaaatgcgtattgaaaagcggttgcctgcagcggacgagaccagctgtagcagcgagatctcagtggcggatcatgcccaggataacccaccgcttattaaagcagaagctgagaaacccagttcaacagagggctgtgcgcgaacaattccctacatgggccgtttgccaaagatacaaacacaaccttcacccttgtcacaggaaacgcttccagggccaccaattcttcaagaaaatatagcgccaccaagtcagaaggaggaagaaccacagaatcagcctatgagcatggtccaagcaggcctgatggattttctggctgaaagtttggaaagcgatgattttaccatgtttggtaacctaccaggcataatgcccccacccctgattggagcgggtaaaaatgatttcttcatgaccgagccgttgcttcacgcacctttgaataatgaaggtcttttcgacatggatacaaattttgccataccaaataccgctgatgagaccaaacccatatcaacagaagaacctgcagccgaaagcagcgaggaacaaaaagaaggcgaggtagaagatgaaaagccagaagaggacgaatcacccgactatcagccacgcatcgtacaggttacaaattaccaggcgcaagaggcaaacgaaagcatcaaagaggaaccactagaagagataatgcaagatgatgacgtcacgacaaatagcaaatcctctatcctagagccttgcaaaccgagtggatttgtcagacaaccacggcgaaattggccctggttgcaggaggcgcaggatcccgatgacatggccattcctagcgaaaatctcaaactaataaatgcatacgaagaacagaagttgtaccagcgactcgatagaatattcgcactggagcatcagtgccacatatccatacctgcctatgtgcggcgcctatatcgaaaactttctcttcgaaaatggaaaagggaccacaatcgacacatatttaacttggacgagcacatagatcccctgggaagagcacgcctaaagatgctgggtcatcagaaggccgaaattcttgacagatatcagttgttagcccattcacgacaagatgcaaggagctcctttcacgcccgcctggcgggatgcactcaatacgagctctttgaatcgccctactctcaaagagttcttcatccatttatctttcggagcgaaacgatggctcctccatggctgaagcttatgtgcgagctgcagcatagagtaaacggatctcatcccacaagatctaccatcgacttctgttttgtgagaccgcagcatattccggccgtaaacgcattactccaaagtactttttggccaaacattgatgtaagcgagtgtttgagctacccggactacagtgtagtggcgttgtacaagaaactggtcatcggttgcggattcctagtgcccgacgtaggttacaacgaggcctacatctcattcatggcggtgcggccgtgctggcaacgcagtggcatcgccagcttcatgttatatcaccttatccagacatgtatgtccaaggacataacgttgcacgtttccgccaccaacgcggccgtcatgttgtaccagaaattcggatttaagatggaggaaatcatcttggacttttatgacaagtatctgcctctggactcgaaacagagcagaaatgccttctttttgagattacaaagatga

SEQ ID NO: 42573 - protein, 774 aa, DROSOPHILA
MNRPSNWDDPQGPCRYCESPVEDDNYLECQECRRMVHIKCLPHACTPGDLLGDVFFEFTCVKCVLDKAKESVIPSDLEPIKEVIVRQRIPWLLVLTLTLYNLSIKQKGLGHHGFFHWRTHIISFVDKNWNYIFGPNVRRRKQWTGSVSGALSHNSPEYFQSGLDVFQENGWWKLAKPFQTPRSVLKEYEKKQQLRLQMRIEKRLPAADETSCSSEISVADHAQDNPPLIKAEAEKPSSTEGCARTIPYMGRLPKIQTQPSPLSQETLPGPPILQENIAPPSQKEEEPQNQPMSMVQAGLMDFLAESLESDDFTMFGNLPGIMPPPLIGAGKNDFFMTEPLLHAPLNNEGLFDMDTNFAIPNTADETKPISTEEPAAESSEEQKEGEVEDEKPEEDESPDYQPRIVQVTNYQAQEANESIKEEPLEEIMQDDDVTTNSKSSILEPCKPSGFVRQPRRNWPWLQEAQDPDDMAIPSENLKLINAYEEQKLYQRLDRIFALEHQCHISIPAYVRRLYRKLSLRKWKRDHNRHIFNLDEHIDPLGRARLKMLGHQKAEILDRYQLLAHSRQDARSSFHARLAGCTQYELFESPYSQRVLHPFIFRSETMAPPWLKLMCELQHRVNGSHPTRSTIDFCFVRPQHIPAVNALLQSTFWPNIDVSECLSYPDYSVVALYKKLVIGCGFLVPDVGYNEAYISFMAVRPCWQRSGIASFMLYHLIQTCMSKDITLHVSATNAAVMLYQKFGFKMEEIILDFYDKYLPLDSKQSRNAFFLRLQR

SEQ ID NO: 42574 - DNA, 3685 bp, DROSOPHILA
gcggggaccggagtgtattgttaaaaacgtatttattgttgaattttgcaagctaaacgagaccaacggattttcacttctccccccggccgcaaaaccacacacaaaggtctctgacaatttaagccaggtcgactgacttttatccttaacaattgtttctcctcctgctcccgtcttatgtgtatccttttttgcaggaataccgaatgccgaatgccgaataccaaacggcacacagcactgaatcacagcaaaaaaaaaaaaaaataaaaccaaatataaatcaataagacaaagaataaactgcatatctcagattatattttagatatatgtaaatgaagtagccataagagttcattaagtattagcttcagacatagtcaggtaaacgtattctggtcagataagtaacaacagcttccctccacatggtaatcatatatctatcgatgaatcgacaaccggcgcttgcaactgcgacgctcaaattcaaattgcgataatgtcgacaacaatcaatttgtgtgatctgcaacgacaacaccttctacaaatgaatgcgacgtgacgacaacaactgcaaatatttataacgcatacgacatgttgctgccatgccaataatgatgatgacatcgcatttactaacacatcttgtaatatccgatgattttcggctttcgaaaatgtatttaacgaacgattgaaacacataataactgcgactataaaccaacataaaataatcaccaaaaaaacacaccaacgcacctccccccgaacacacacactatatatacacacaaacttcaaaacaatcctacactgtaccgaaaacttgcaacacttgcaacacaaacgttgacgttggtttttcctaacctgcagcaaaagtttaagtgccatttggcgagtgagtgagtccgtcagccgacgagtaagtctgacagagacacggcctgtgtgtaaataataaataataaataataaaaaaaaagagaataaaaagagcatttaaagttattagtaaccatcgttgttgttgagttgttgttgttgttaccaactgtcgacatacccttgcaactgccggcgaaaacatagcgaaataatgggtctgcagatgacagcagcccgtccaatcgcagctctcagcctactagtgttgtccttgctcacctggactcaccccacaatcgtggatgcagcccgatcaataccacttctgctatcgcgctgcactggagtacttgggctcattcgacaattatacaaactgagtgcatttctcaatgggattgccaggtccacagagctaaaatctcatcgaccctgcgttcgttgcatacttatttcgaactctacgcataatacgcatttacgatatacacggatatcataactctaaagtattatagccagctactgcccacacttacttaatacacctatacttatatacgtggatatgtttagttgataagcgcacccccgcccgcaggttatgttaccattacgattctttgggggactcgatcttatatattgcgttctattttattgataatgtaaactaaagaagactgttacacgtttaattatcaaaaccttatatatcaacccacatgcacttctatgtacgagtatgtgcatcaagatttgctcgctaatggagaaggatgtcaatcaacttgttgttgttcgtggtactgccgccggagtgaccatgaatgaggggcgccactggaaaccgatacatatttgaactaaggacttggtagctattagtcttaccgcctaaatcgaatctcgaacggaagcaaagggtcgaaagtagaagccattttaagtaaatcgaaaacttctggcgatttggcgcaaactccagacgctattataatatataatacaatcaatcaaacactgctatgttaatcagttttcatgccttggttaatggaaaccagtataaacggtccgtgcaattagtcaaaagtcttgcatagcgcatattttataaggcagctagattctaaaattagttttcaaacacaacttacgttttgatctccccgcaaaagatgacgaaccttatggactgatcgatgtcttggtagctaacagacagttcaaatttcaaagaccattatgatagatcacatacgcaacttccagccaagcagctattttaacttcaacctcattccctcgacttctattcagttccctagtacattcctgtatataccacagtcgatacccgagctagccacttatgtatgtgtaatttagattgaaaagctatgaaaagttattgtacctaaggtgtatgaagacatagagaataaccgagcgaacagattagaatgataactgtagatatgtactgtagcatataatttttaccataaaatagagcgacacacgcggttataaataaacataaacataaaatcgagacattggcaatagttcttaaggtacataataatgtatataactgataagctgttttgcaaaacgtttgaattcggcctcgtaactatacataaatatataaagagttagcaagcaaatgcttaaaagcaaacactaaattattagctgaaacacatgttaaacaaccatagtcatatgtaaactaaatatttatacgaaataaaggtatttgttataactactctagcatgttgcccctgccaattggatcggaagtgttaggaagtagtaaattttgagacgatgttggacggctgggcgtatttggaataaaccgagagatactaaattaaactatagcgctagcaaaaatagatgtctagataatggtacccccgcagagagttgcaatcgtattacacgtaacatatacataaattgaaatgtacgattatattgtatattacacaatctgccggcttgtcaagttttgttaagataattaattgttttgtatgttttacgaaatagaaagataaaacaattttaaaggtcatacgatacacaaacaagcaaacaatataatgattatactaatcaagcaaacagaagagcgtatgtatttcgcattaaagtatgggtaagaatgtcatattatgtttaaaaataccatgcaaataatatatcattttcaaaaaactgcaaactgaatgatgaaaaataataaaagacgaaaataaaaaccgtttagagcctttaatttacccttcaaaaggtatttgatggtagtttattttatacttttacatcattacaaagtattttctttatcgctagccactacttttgttttttttttatttttgtctttctgacgaatccattaacagatccatttttgaatacatcatagacgaagaagcctgccaagccatgagccatcatgaggaaaaattgtaatcagagggagcaatctctggtcaatcggctggtggggtagtgctttccaagtaagattttacgagccaactatgatgagtctgtgagccctgtggtgccgccaaatactttgtcacgtccatatccatattccttacaatgatggtctcgtttggtattcaagctaacaataaacatagccatcttccttcacggtcaacatacacgtccacatttgaatagaatgtatttcaaaagtaattgccattattaattaattcatttgaatcttaatacaatg

SEQ ID NO: 42575 - DNA, 7630 bp, DROSOPHILA
aaagagaataaaaagagcatttaaagttattagtaaccatcgttgttgttgagttgttgttgttgttaccaactgtcgacatacccttgcaactgccggcgaaaacatagcgaaataatgggtctgcagatgacagcagcccgtccaatcgcagctctcagcctactagtgttgtccttgctcacctggactcaccccacaatcgtggatgcagcccatccgccggagatcatcaggaagccgcagaatcagggagtccgagtgggcggcgttgctagcttctattgtgcggcccgcggtgatccgcctccatcgatagtgtggcgcaaaaatggcaaaaaagtttcgggaacccagtcgcgttacacggtgctggagcagcccggcgggatttccatactccggattgagcccgtgcgggcgggacgcgatgatgcaccatacgagtgtgtggcggagaacggggtgggcgatgccgtttccgcagatgcaactttaaccatatatgaaggatggcagaaaacggcaacttccggcgataaaacacccgcaggctttccggttataacccagggtccgggaactcgcgtcattgaagtgggtcacacggtcctcatgacatgcaaagccatcggcaatccgacgccaaacatttactggattaagaatcagacaaaggttgatatgagcaatccgcgctactctctcaaggatggcttcctgcaaatcgaaaacagtcgcgaggaggatcagggcaaatacgagtgtgtggctgagaactcaatgggcacggagcactcgaaggccaccaacttatatgtgaaagtccgtcgtgttccgcccaccttttcccgcccaccagagaccatcagcgaggtgatgttgggatctaatctgaatctatcctgcattgccgtcggctcacccatgccgcatgtcaagtggatgaagggctccgaagatcttacacccgagaatgagatgccaatcggacgaaatgtcctgcagctgatcaatatccaggagagcgccaactacacttgcatagcggcctccactttgggccaaatcgattccgtttcggtggttaaagtgcaatctctgcccaccgcacccaccgatgtgcaaatctccgaggtgaccgccacttcggtgcgtctggagtggtcgtacaagggtcccgaggacttgcaatattacgtgatccagtacaagccgaagaacgccaaccaggccttcagcgagataagcggcatcatcaccatgtactatgtggtccgtgccctgagtccctacacggagtacgagttctacgtgatagccgtgaacaatattggacgcggaccgccctcggcaccagcgacatgtaccaccggtgagacagaaatggaaagtgcaccacgtaatgtccaagtgcgtacgctgagctcgtccacgatggttattacttgggaaccaccagagacgcccaatggacaagtgaccggctacaaggtgtactacacgaccaattcgaatcagccggaggcgtcgtggaactcccagatggtcgacaatagcgaactgaccacagtctcggagctgacgccccacgccatctacacggtccgggttcaggcctacacatcgatgggagccggtccaatgtccacgccggtccaggtgaaggcccagcaaggtgtgccatcgcaaccgagcaatttccgggcaaccgatatcggcgagaccgcagtcacactgcaatggaccaagccgacgcattccagcgagaatatcgtgcactacgagctctactggaatgacacatacgccaatcaggcccatcacaagcgcatttccaactcggaggcgtataccctggacggactctaccccgataccctctactacatctggctggctgcaaggtcgcaacgtggcgagggggccaccaccccgcccattccggtgcgcaccaagcaatatgtaccaggtgctccgcctcgaaatatcaccgccatagccaccagctcgacgaccatatccctcagctggctgcctccgcccgtcgagcgatcgaacggccggatcatatactataaggtgttcttcgtggaggtgggtcgcgaagacgacgaggccaccaccatgaccctcaatatgaccagcattgtactggacgagctgaagcgctggacagagtacaagatctgggtgctggccggcacctccgtcggggatgggccgcggtcgcatcccatcattttgcgcacccaagaggatgtgcccggcgatccgcaagatgtgaaggccacacctttgaactccacttcgatccatgtcagctggaagccgcctctcgaaaaggatcgcaatggcatcatccgtgggtatcatatacacgcccaggagctgcgagatgagggcaagggctttttgaacgaacccttcaagtttgatgtggtagacacgctggagttcaatgtgactggcttgcagccggatacaaagtactccattcaggtggcggcactaactcgtaaaggagatggtgaccggagtgctgcgattgtggtgaaaactcctggcggagtaccagttcgaccaacggtgagtctgaagatcatggagcgggaaccgatcgtgtccatcgaactagaatgggagcgaccggcgcagacctatggcgaattgcgtggctatcgacttcgatggggcgtcaaggaccaagcactgaaggaggagatgctgtcaggaccgcagatgaccaagaaacggtttgataacttggaacgcggagttgagtacgaatttcgtgtggcgggcagcaatcatattggtatcgggcaagagacggtgaaaatatttcagacacccgagggaacacccggtggaccgccttctaacattaccattcgcttccaaactccggatgtactgtgcgtgacctgggatccaccaactagggagcaccggaatggcataatcacccgctatgatgttcagtttcacaagaaaatcgatcatggcctgggatccgagcgaaatatgactctccggaaggcggtgttcacaaatctggaggagaacaccgagtatatcttccgggtgagggcttatacgaagcagggagctggtcccttcagcgacaagttaatcgtggagacagaacgtgacatgggtcgagcacctatgtccctgcaggcagaggcaacatcggagcaaactgcggagatttggtgggaaccggtaacaagtcgtggcaagttgctgggctacaagatcttttacaccatgacagctgtcgaggatctggacgattggcaaacgaaaaccgttggacttacggaatccgctgatcttgttaatctcgagaagtttgcccaatatgccgtggccattgcggcgaggttcaagaacggattgggacgtcttagtgaaaaggttacagtacgcatcaagccggaggatgtgcccttaaatcttcgcgctcacgatgtcagcacccattcgatgaccttgagttggtcgccacccattcgcctaaccccggtaaactacaagatcagcttcgatgccatgaaggtgtttgtggactcgcagggattctcccagacccagatcgttcccaagcgagagattatccttaagcactatgtgaagacccacactatcaacgaactcagtccgtttaccacgtacaatgtgaatgtgagtgccattccctcggattattcctaccggccgcccacaaagattacggtcacaacgcaaatggctgcacctcagccaatggtgaagccggatttctacggcgttgttaatggcgaggaaattctggtgatactgcctcaggcttcggaggaatatggacccatatcgcactattatttggtggtggtcccggaggacaagtccaatctgcacaagatacccgatcagttccttaccgatgatctcttgccgggcaggaataagccagagcgtccgaatgcaccgtacattgcagccaagttcccgcagcgttccattccgttcacattccacctgggatctggcgatgattatcataactttacaaatcgcaaattggagcgagagaagcgctaccgcatctttgtgcgagcggttgtggatacgccacagaagcacctctacacctccagtcccttctctgagttcctatcgctggacatgagggaagctccgccaggtgagcggccccaccgacccgatcccaattggcccgcggagccggaagtgtcggtgaaccgcaacaaggacgaaccggagattctgtgggtggtgctgcccctgatggtgtccacattcattgtgtccaccgccctgatcgttctctgtgtggttaagcgtcgtcgccagccgtgcaagactccggatcaggcagctgtcacaaggccactgatggccgccgacctgggagccggacctacgcccagcgatcccgtggacatgaggcgcttgaacttccagacacccggcatgatctcccatccgcccataccgatatccgagtttgccaaccacatcgaacgactcaagtccaatgacaatcagaagttttcgcaggaatacgaaagcattgagccgggccaacagttcacctgggacaactccaatctggagcataacaagtctaagaatcgctatgcaaatgttaccgcctacgatcattcacgcgtccagttgccagcggtggagggtgtggttggatcagattacatcaatgccaattactgtgacggctatcggaagcacaatgcctacgtggcgacccaaggtccgttgcaggagacctttgtcgacttctggcgcatgtgttgggaactgaagacggcaaccattgtgatgatgacgcgattggaggaacgaacgcgcataaagtgcgatcagtattggcccactcgcggaacggaaacctatggtcagatctttgttaccatcacggagacacaggaactggccacctacagcatccgcaccttccagttgtgccggcagggctttaacgatcggcgtgagatcaagcagctgcagttcacagcctggccagatcatggagtgcccgatcatccggcgcccttccttcagttcttgcgccggtgtcgcgccctcacgccaccggaatccggacccgtgattgttcactgctctgcgggagttggtcgcactggctgttatatcgtaatcgattcaatgttggaacgaatgaagcacgagaagattatcgacatctatgggcatgttacttgtttacgggcgcaacggaactacatggtgcagacggaggatcagtacatcttcattcatgacgccatcctggaggccatcatctgtggggtgacggaggtgccggctcgcaatctacacacccacctacagaaactattgatcacggagcccggcgagaccatctcgggcatggaggtggagttcaagaagctgtctaacgtcaagatggactcgtccaagttcgtaacggccaatctgccgtgcaacaagcacaagaatcgcctggtccacattctgccgtacgagtcaagtcgcgtctacctgacccccatccatggaatcgagggaagcgactatgtcaacgccagcttcatcgacggctatcgttaccgttccgcatacatcgccgcacagggtcctgtccaggatgccgctgaggacttttggcgcatgctctgggagcacaactccaccattgtggtcatgctgaccaagctcaaggaaatgggaagggaaaagtgcttccagtactggcctcatgagcgatccgtacgctatcagtattatgtcgtggatcccattgctgagtacaacatgccgcagtataagctgcgtgaatttaaggtcacggatgcccgagatggctcatcgcgcaccgtccgccagttccagttcatcgattggccggagcagggtgtgcccaagtcgggcgagggcttcatcgacttcatcggacaggtgcacaagaccaaggagcagtttggccaggatggacccattaccgtgcactgttcggcgggcgtgggacgttcgggtgtctttatcactctgagcatcgttctggaacgaatgcagtacgagggagtactggacgtcttccagacagtgcgcatactgcgatcccagcgtccggctatggtacaaaccgaggatcaataccacttctgctatcgcgctgcactggagtacttgggctcattcgacaattatacaaactgagtgcatttctcaatgggattgccaggtccacagagctaaaatctcatcgaccctgcgttcgttgcatacttatttcgaactctacgcataatacgcatttacgatatacacggatatcataactctaaagtattatagccagctactgcccacacttacttaatacacctatacttatatacgtggatatgtttagttgataagcgcacccccgcccgcaggttatgttaccattacgattctttgggggactcgatcttatatattgcgttctattttattgataatgtaaactaaagaagactgttacacgtttaattatcaaaaccttatatatcaacccacatgcacttctatgtacgagtatgtgcatcaagatttgctcgctaatggagaaggatgtcaatcaacttgttgttgttcgtggtactgccgccggagtgaccatgaatgaggggcgccactggaaaccgatacatatttgaactaaggacttggtagctattagtcttaccgcctaaatcgaatctcgaacggaagcaaagggtcgaaagtagaagccattttaagtaaatcgaaaacttctggcgatttggcgcaaactccagacgctattataatatataatacaatcaatcaaacactgctatgttaatcagttttcatgccttggttaatggaaaccagtataaacggtccgtgcaattagtcaaaagtcttgcatagcgcatattttataaggcagctagattctaaaattagttttcaaacacaacttacgttttgatctccccgcaaaagatgacgaaccttatggactgatcgatgtcttggtagctaacagacagttcaaatttcaaagaccattatgatagatcacatacgcaacttccagccaagcagctattttaacttcaacctcattccctcgacttctattcagttccctagtacattcctgtatataccacagtcgatacccgagctagccacttatgtatgtgtaatttagattgaaaagctatgaaaagttattgtacctaaggtgtatgaagacatagagaataaccgagcgaacagattagaatgataactgtagatatgtactgtagcatataatttttaccataaaatagagcgacacacgcggttataaataaacataaacataaaatcgagacattggcaatagttcttaaggtacataataatgtatataactgataagctgttttgcaaaacgtttgaattcggcctcgtaactatacataaatatataaagagttagcaagcaaatgcttaaaagcaaacactaaattattagctgaaacacatgttaaacaaccatagtcatatgtaaactaaatatttatacgaaataaaggtatttgttataact

SEQ ID NO: 42576 - protein, 2037 aa, DROSOPHILA
MGLQMTAARPIAALSLLVLSLLTWTHPTIVDAAHPPEIIRKPQNQGVRVGGVASFYCAARGDPPPSIVWRKNGKKVSGTQSRYTVLEQPGGISILRIEPVRAGRDDAPYECVAENGVGDAVSADATLTIYEGWQKTATSGDKTPAGFPVITQGPGTRVIEVGHTVLMTCKAIGNPTPNIYWIKNQTKVDMSNPRYSLKDGFLQIENSREEDQGKYECVAENSMGTEHSKATNLYVKVRRVPPTFSRPPETISEVMLGSNLNLSCIAVGSPMPHVKWMKGSEDLTPENEMPIGRNVLQLINIQESANYTCIAASTLGQIDSVSVVKVQSLPTAPTDVQISEVTATSVRLEWSYKGPEDLQYYVIQYKPKNANQAFSEISGIITMYYVVRALSPYTEYEFYVIAVNNIGRGPPSAPATCTTGETEMESAPRNVQVRTLSSSTMVITWEPPETPNGQVTGYKVYYTTNSNQPEASWNSQMVDNSELTTVSELTPHAIYTVRVQAYTSMGAGPMSTPVQVKAQQGVPSQPSNFRATDIGETAVTLQWTKPTHSSENIVHYELYWNDTYANQAHHKRISNSEAYTLDGLYPDTLYYIWLAARSQRGEGATTPPIPVRTKQYVPGAPPRNITAIATSSTTISLSWLPPPVERSNGRIIYYKVFFVEVGREDDEATTMTLNMTSIVLDELKRWTEYKIWVLAGTSVGDGPRSHPIILRTQEDVPGDPQDVKATPLNSTSIHVSWKPPLEKDRNGIIRGYHIHAQELRDEGKGFLNEPFKFDVVDTLEFNVTGLQPDTKYSIQVAALTRKGDGDRSAAIVVKTPGGVPVRPTVSLKIMEREPIVSIELEWERPAQTYGELRGYRLRWGVKDQALKEEMLSGPQMTKKRFDNLERGVEYEFRVAGSNHIGIGQETVKIFQTPEGTPGGPPSNITIRFQTPDVLCVTWDPPTREHRNGIITRYDVQFHKKIDHGLGSERNMTLRKAVFTNLEENTEYIFRVRAYTKQGAGPFSDKLIVETERDMGRAPMSLQAEATSEQTAEIWWEPVTSRGKLLGYKIFYTMTAVEDLDDWQTKTVGLTESADLVNLEKFAQYAVAIAARFKNGLGRLSEKVTVRIKPEDVPLNLRAHDVSTHSMTLSWSPPIRLTPVNYKISFDAMKVFVDSQGFSQTQIVPKREIILKHYVKTHTINELSPFTTYNVNVSAIPSDYSYRPPTKITVTTQMAAPQPMVKPDFYGVVNGEEILVILPQASEEYGPISHYYLVVVPEDKSNLHKIPDQFLTDDLLPGRNKPERPNAPYIAAKFPQRSIPFTFHLGSGDDYHNFTNRKLEREKRYRIFVRAVVDTPQKHLYTSSPFSEFLSLDMREAPPGERPHRPDPNWPAEPEVSVNRNKDEPEILWVVLPLMVSTFIVSTALIVLCVVKRRRQPCKTPDQAAVTRPLMAADLGAGPTPSDPVDMRRLNFQTPGMISHPPIPISEFANHIERLKSNDNQKFSQEYESIEPGQQFTWDNSNLEHNKSKNRYANVTAYDHSRVQLPAVEGVVGSDYINANYCDGYRKHNAYVATQGPLQETFVDFWRMCWELKTATIVMMTRLEERTRIKCDQYWPTRGTETYGQIFVTITETQELATYSIRTFQLCRQGFNDRREIKQLQFTAWPDHGVPDHPAPFLQFLRRCRALTPPESGPVIVHCSAGVGRTGCYIVIDSMLERMKHEKIIDIYGHVTCLRAQRNYMVQTEDQYIFIHDAILEAIICGVTEVPARNLHTHLQKLLITEPGETISGMEVEFKKLSNVKMDSSKFVTANLPCNKHKNRLVHILPYESSRVYLTPIHGIEGSDYVNASFIDGYRYRSAYIAAQGPVQDAAEDFWRMLWEHNSTIVVMLTKLKEMGREKCFQYWPHERSVRYQYYVVDPIAEYNMPQYKLREFKVTDARDGSSRTVRQFQFIDWPEQGVPKSGEGFIDFIGQVHKTKEQFGQDGPITVHCSAGVGRSGVFITLSIVLERMQYEGVLDVFQTVRILRSQRPAMVQTEDQYHFCYRAALEYLGSFDNYTN

SEQ ID NO: 42577 - DNA, 5341 bp, DROSOPHILA
ctgtgcgactgcagcatggccatcgagcgccatccaatcgccatggccatccaataaattgctgcccccggagtgtgtccgatggcaaccaactcaagttgaaattggtcaaaagtttaacatatttgcgtgtgtgtgtccaagtggcgcacgggtatgatgggggggtagagcagttggtcgttccggtcgtttttggcgcattttcggggaataaacgaccccgcagcatatacgcttttgtttttgtcgagtggcctgctcccagcaattttggaattttggaatttaagtacgcaaacgggcagctcaagcgtttaatcgtttaataaaagtaaacaaaaaattggcgcttacttgaataaagttaaaaacttcatttgggtttcaaattataaaagtaatcaacttcactatacataattcaacaataactcttataaaaactaaataataatagtaataataaataataataataataataataataataaacaataagactaacaataaataataatgagtatttcaacaattaataaagctcttcctttagatgcataaaatatatttactgctagttaacattacacattcaaagtaattcatatttcgatttcatttcaatatttgactaaactttaactatcagatttagtttatctacgaactaagcttgtgcttcagagtagaggtacagaattgttgcacgagtatgtattagataatctcataaggaacgtattacgactaaggcctcgaggcgaaaggcagcgcctaagatctaccgcagcattgcagggtaagtaatggttatatcgttacttcgatatccgacagcgcactggataacaatctaatcgggttaatacaaaggcgtcgcacaaccgtaggaaagctttgactagcactttgagattcgagtaaatgactaaatagatttcaacgtgggtaggcggccattaggaagcctagctttggttagcatctcagtagtttactgcaacacacaaacggcggaggcgccgctatattggttattcaagcgtcgacgcattccctccagataaatgtcgcgactgaagagcccagcagccaagggaattctgaagaaaaaggaaagttcattagaatcctattttctttgtaataattccaattactcacgcatcggttcctgcacgtatgagtgttcgaaaaagcgcccaaactggcttgtggtccgaggtggttatcgatggcaccgagtcatagagcagacattggacatgcggctgcgtgggtgtggatacaccaggcactagggtctgccgacggatgactagtccctgcatttggcggtacttgtagagaatgcgatccgtgtaggcgggagctcgctgcttcgacgaggtatcaaagttctggctgcccggatcgtacttgtacgtgggtggaaatgtgatgttcgcctccataaatcctcggaaggcggcgccatcagccagaacggaagtcaactgatccgtgtgcatgtaaccgtgcggtaaatgcgacggcagcgggaacttggtgttctgaatccattccagcagcttttcacgcggctcacccagtcgaaagttaagatcgccgcaccagaagacattgtcaaagttctgcgtgacatctttgttcttatgccgctgattgggcaaattgcgaggcaagtccagagcattgattatccgcttaacgtccgacacacgctctttaaccttctgctggtgcgccgttaaatgcgaggtcacaaacagcatggaagtgccaaacaggcaaaaggatatggccacggcaccctttgtccgaaaggcggagcccgtgcgcaccgacatagatgcgtcctcgggaacggagcagtaccagatcaagtcccgtcgcatatacacagccaggtggagggtacccagagttgtggcatggaagagcacgtgagagggacctagggtctcctgaatggtgacctcccactcgaagcggtctggggtggactcctgtgtgcccattaccacaatgtcgggcacgtgctccacattggctggcagcacaaaatcattaagttgtctgcaataaaaagaataattgagatatgaactcataagcttttagacttaatttattaaatttacatacttgggtggactgtggccattcatattccaagttcccacaaagacggtaatctccttttgcggcagcacgcggcttagctcactgggacccaaaagggaagttgatcccagcctgccatccaggtaacttcgctccctggcgttatccgccgggatcagattcaatgcatgtgccgccattaaagtctggcgagccagattagatcccgaaccctgtctttggagtgtcatgttctcgtgcgacataaacctcacgcctggctgctcctctatgtgttctattccatctggctgagtggctatattcggcgaggacatgtgctgtggtgtggtggctcttttaatgtcaccaggttctgtggctgcctgaagagggggtaactcttgtccaggtggatagagctttaaacgcagtcgggatcggcaggctgatactgccatgggtcgaatgggcgagcgattttgaaggctttcgctccgtgccaccgaagcgctggccgcagcagggctgcagtgggcaaagaaggttttgctggccaccggtgattctggcgcactggcacactcactggacggacgcggtcggtgtgaggatccttcgctggagtgcagcgagcccgagttgttgtccaccatgctccaacttagcgagaggttatcgcgccgcagaacactgttgctatccggtatggagttataacgcacggtcaccggcggtgtcatcggtttcttttccgccttgcagcacagactgaactggtgactaaatctattgtgattgggtgagcgatgcttgggcgacttgcgccgcatcaccacgtcggctcctccatcgctttgggaaccagcatccgtactgtgccggtgcgagtgattctttcctttcgaggaacttggctttgcacgcctgtggaagctgatcagcccgctgtgcgacttctccagcggcagcgtttggcttttgagggtgctcccattgttattgacatggtttgcagacgtatctgcattgcacttggcgaaactgacatcgtattggccacaggcggacacgggtctctgttgtaatcttggcgattcgggtgtcacgggatgtggctccaccttactaggtcgcttgctcagcaaaccgaacagggagctcgcggtcttgtgaccggatctgggactgctggtggaactggttatccgttcctcacttcccgcgctgctgtgctgcatgttggctttagtccgaacgaaatgattctatcatctaaggtgaaggtgctaagtggttatcatgccccccttttgtcaagttaattcgctctatctgccggatctctcgaaccgagctcattgtgcgatggcctctggctgccggccatataaatagtaaagccagacgtcatcgagcgagcacaatgcaaatgcgactttggtccggcgttctggctggtcgcaatgcaaattattttgggctcggcgatgacgtacacgaaatcaggctaattgggctgactggcggcgattgcgtgtgctgttctgtaagattttaatgaaggtaaacatttaggcgggttggtaataccaagggtataatacacttactaacctgcaagcaactaaataaaaaaaacacatatgtgggcagatcctttggggcgagagagctgaaaggattcagaaaatcaatatgctgggtaataactgtggcgacaccgtcgcgatatataaaatggggaggattgtgggcgatttggggggtggttggtcgcggaagggtggtctttggcgacgacgtaacaacattggcatgctgcggcgcccacgcatccaagcactgagcactcagcatctgaacgtctgaacacaagcacaatatccgtcgtctgctggctgattcgattctctgggatcgagagatttataattagcagaccattgttcccgtcagcgcagccttgttgttcttgtgttgttggcctacgtctagcataaaagcagcaacaatagcacatagcacacatgcgatattcaagttcaggttcaggtgcgcattgatttcgctcttggtgtgcttttcatgttccgcactggtacgcactacccttccacgctgctgtcacctatgcgatttatgtaatttttgtatgatttaccgcgttccaatgttgtttacacccaaaaactccgagcaagtgcggaacttgtcgtgggaactgcgatttaggggtggcaaaagtgggcagccaactgccgataagtgggagcacgtatcgataggtgcgggcgggggtgtttcagtggctgggttgtgacacgatagatttaaagaaatatttcttaaatattaattaagatttgtatttaattgtgtttccagcaaaacgtaccaatgtaatatttattaggtaaacatacataacaaagcgctatatattcaatacaaaattgtgggccaagtacccttcaaaaatttattaagaggaatttataacattattattaaatgtactttattattttttacaattatttaataaaccgtttcttatattaaaaaaaataataaggtttaattaactgtattatacagccacactagaagtgcaatcgaaatcgacttgctatcggtgctcgtaaggcgcatcactagtatttcgtttcggtcggtacgcggttcagcgtttttgttcaacggattagcgcaagttaagcacgatggcggcccagacgatactgtttgatttcacgctggacaaggacaagacggcggatgaggaggcgcgcctccaggtggccaaaatcctgcgtaacgagctggagcagctgttcccccagctggagctggcctactcgatggagtcgccggaaaacggctactttgcggtgctgcacgagaacaaggacacggtgattacctgccgcatcttccagcacggcctgctgacgctcaacgtggagtacttcctgcccgatggcaaggagccgagcatatccttcgacgtacgtattcagtgcaatttagattcctttaaaaaactcaaaaaacaagcaagcaaacacccgacagcagcaccaccacccacatctttcttaccctcccagtttccgtgtctcggctgattagttggggaaagggttttccacccaccgggtaaaattgattttccgcgcacttgtacccgagtgttgttgcttca

SEQ ID NO: 42578 - DNA, 2652 bp, DROSOPHILA
cgcacttgctcggagtttttgggtgtaaacaacattggaacgcgctctctcgccccaaaggatctgcccacatatgtgttttttttatttagttgcttgcagaacagcacacgcaatcgccgccagtcagcccaattagcctgatttcgtgtacgtcatcgccgagcccaaaataatttgcattgcgaccagccagaacgccggaccaaagtcgcatttgcattgtgctcgctcgatgacgtctggctttactatttatatggccggcagccagaggccatcgcacaatgagctcggttcgagagatccggcagatagagcgaattaacttgacaaaaggggggcatgataaccacttagcaccttcaccttagatgatagaatcatttcgttcggactaaagccaacatgcagcacagcagcgcgggaagtgaggaacggataaccagttccaccagcagtcccagatccggtcacaagaccgcgagctccctgttcggtttgctgagcaagcgacctagtaaggtggagccacatcccgtgacacccgaatcgccaagattacaacagagacccgtgtccgcctgtggccaatacgatgtcagtttcgccaagtgcaatgcagatacgtctgcaaaccatgtcaataacaatgggagcaccctcaaaagccaaacgctgccgctggagaagtcgcacagcgggctgatcagcttccacaggcgtgcaaagccaagttcctcgaaaggaaagaatcactcgcaccggcacagtacggatgctggttcccaaagcgatggaggagccgacgtggtgatgcggcgcaagtcgcccaagcatcgctcacccaatcacaatagatttagtcaccagttcagtctgtgctgcaaggcggaaaagaaaccgatgacaccgccggtgaccgtgcgttataactccataccggatagcaacagtgttctgcggcgcgataacctctcgctaagttggagcatggtggacaacaactcgggctcgctgcactccagcgaaggatcctcacaccgaccgcgtccgtccagtgagtgtgccagtgcgccagaatcaccggtggccagcaaaaccttctttgcccactgcagccctgctgcggccagcgcttcggtggcacggagcgaaagccttcaaaatcgctcgcccattcgacccatggcagtatcagcctgccgatcccgactgcgtttaaagctctatccacctggacaagagttaccccctcttcaggcagccacagaacctggtgacattaaaagagccaccacaccacagcacatgtcctcgccgaatatagccactcagccagatggaatagaacacatagaggagcagccaggcgtgaggtttatgtcgcacgagaacatgacactccaaagacagggttcgggatctaatctggctcgccagactttaatggcggcacatgcattgaatctgatcccggcggataacgccagggagcgaagttacctggatggcaggctgggatcaacttcccttttgggtcccagtgagctaagccgcgtgctgccgcaaaaggagattaccgtctttgtgggaacttggaatatgaatggccacagtccacccaaacaacttaatgattttgtgctgccagccaatgtggagcacgtgcccgacattgtggtaatgggcacacaggagtccaccccagaccgcttcgagtgggaggtcaccattcaggagaccctaggtccctctcacgtgctcttccatgccacaactctgggtaccctccacctggctgtgtatatgcgacgggacttgatctggtactgctccgttcccgaggacgcatctatgtcggtgcgcacgggctccgcctttcggacaaagggtgccgtggccatatccttttgcctgtttggcacttccatgctgtttgtgacctcgcatttaacggcgcaccagcagaaggttaaagagcgtgtgtcggacgttaagcggataatcaatgctctggacttgcctcgcaatttgcccaatcagcggcataagaacaaagatgtcacgcagaactttgacaatgtcttctggtgcggcgatcttaactttcgactgggtgagccgcgtgaaaagctgctggaatggattcagaacaccaagttcccgctgccgtcgcatttaccgcacggttacatgcacacggatcagttgacttccgttctggctgatggcgccgccttccgaggatttatggaggcgaacatcacatttccacccacgtacaagtacgatccgggcagccagaactttgatacctcgtcgaagcagcgagctcccgcctacacggatcgcattctctacaagtaccgccaaatgcagggactagtcatccgtcggcagaccctagtgcctggtgtatccacacccacgcagccgcatgtccaatgtctgctctatgactcggtgccatcgataaccacctcggaccacaagccagtttgggcgctttttcgaacactcatacgtgcaggaaccgatgcaattcccttggctgctgggctcttcagtcgcgacatttatctggagggaatgcgtcgacgcttgaataaccaatatagcggcgcctccgccgtttgtgtgttgcagtaa

SEQ ID NO: 42579 - protein, 747 aa, DROSOPHILA
MQHSSAGSEERITSSTSSPRSGHKTASSLFGLLSKRPSKVEPHPVTPESPRLQQRPVSACGQYDVSFAKCNADTSANHVNNNGSTLKSQTLPLEKSHSGLISFHRRAKPSSSKGKNHSHRHSTDAGSQSDGGADVVMRRKSPKHRSPNHNRFSHQFSLCCKAEKKPMTPPVTVRYNSIPDSNSVLRRDNLSLSWSMVDNNSGSLHSSEGSSHRPRPSSECASAPESPVASKTFFAHCSPAAASASVARSESLQNRSPIRPMAVSACRSRLRLKLYPPGQELPPLQAATEPGDIKRATTPQHMSSPNIATQPDGIEHIEEQPGVRFMSHENMTLQRQGSGSNLARQTLMAAHALNLIPADNARERSYLDGRLGSTSLLGPSELSRVLPQKEITVFVGTWNMNGHSPPKQLNDFVLPANVEHVPDIVVMGTQESTPDRFEWEVTIQETLGPSHVLFHATTLGTLHLAVYMRRDLIWYCSVPEDASMSVRTGSAFRTKGAVAISFCLFGTSMLFVTSHLTAHQQKVKERVSDVKRIINALDLPRNLPNQRHKNKDVTQNFDNVFWCGDLNFRLGEPREKLLEWIQNTKFPLPSHLPHGYMHTDQLTSVLADGAAFRGFMEANITFPPTYKYDPGSQNFDTSSKQRAPAYTDRILYKYRQMQGLVIRRQTLVPGVSTPTQPHVQCLLYDSVPSITTSDHKPVWALFRTLIRAGTDAIPLAAGLFSRDIYLEGMRRRLNNQYSGASAVCVLQ

SEQ ID NO: 42580 - DNA, 4038 bp, DROSOPHILA
agggtagaaggtttcgtttcgattagaaatcgcagcaggcgcgcagcaaagtgcagcaggtaagtgaagccgtcgcaacattcggtcgagctcccattccacatcaccattaccattaccttatgcccattccccattccttgggccaccgttcctcggaatggctaaaattaactcgccatcgatgggcgggtaatacccttccattcgagcaggtcccaaaatttgaaatcattacaaagtctccctaatttgtctcaatctttgtaagtttaaggatttagaaagttatatcacttaccattccaaaaaaaactggttgtgtttaatatacatatgcacaaattatatttacaaatattgatttaggattagttttagtttatttatggagattttgcttattaaacggtacaaaacttaaatcgccccaagtcaacttgttcattaaagcggtagtccacttccaacgatagtgtataaccacaattatgttgccctttttgctgagccagaagaacggaggcaagcagcacttctttatttttagccgtcattgggaacgggcaaaaaagggaagctagtgggaataagaatgggaacggcagaaacataaaaaggaggatggtatctgctcagggcgagccgaaactagtctgcgttcggaagggatttcagaaatatttttcatattttattgagaacaatagcataaatacatcaaattaaaaagggcgtattaaaaatacggtgttcaaaaatgagtactttattaaaaacttgtctaagtacacttcacaacccaggtatttttaatataataacaatttattgttaaaatttacgttagaactctctaaaaaaaattaaggcatgtgaaaatgcttttcaaatttaaatagtgcgccaaacataagtccgattagtaatcgataacccaagtacttatcgccaactaaaatgacaggtgaatgccaatgactcttcctctttcctttttggcccccagctggtttataattttctcgctaatttattttattttcgattttcgtttagtttccaatttgttttgatgatcggttaattaaactatggatcagttgtacctggagatcgagatcagcactcaaaaagagaccaccatttatactggtgtgtcctcgttcttggctttgtttacttacaaatttttgaaagatcccaaaaatgtgcgagtaaacttcgtttccacaaaggttggccacaattcttttttgtagcttaattaaagatttttaacgattgttaccatccaagatcgaaggcggtaaaatagctttacggagttcccaactcaaaaaggaactgaccgaccggcacatcacatgcagggatgccgcatccttgcctgccatccaggatctaaaacttccaatctacgagaaggacggaaatacattcatagcaggaacgtgtgccgtttgccggttggttattggtaaataaaagaatccatattcacctaatatttcctttatttcagagagcttattgcaagacaaccaaatgaggaactcaagaaacttttaggctttaagggaagctgcctcttggctccgtcagaagcatcgatttggactaagttctgtgaggtggatttagtggctgttgtcagtaaacttcatagtgggcaagttttggaattcgtcccccaagaagtagtgaggttcgagcagcacatgaacgaaccggtgaggatgcataacatctataaacaggccagagagcaggccaatcagactgagaatggcggcaaggtcaagaggagagaacgagtgcaaatcaagtgcactacacctaaggaagagctgcttattgagcaccgcttcgccgagggcatcagtttcacaattgcggatataattttgtacccccttttgagaattgtcttccaacattgcgggcagatgctgccccattttccactcactagtacctggttcagcgaggtttgtagatttgatctgtaaaagtaactagagctaatattatatgttttagatcgactctttcggcgataaatgcgccagggttctaagagatctttatgtgccgcaagcaattaagacccctcccggagaactgggaatccccgactgcgaggccaccagtctgtacaaagccgatcccaagcgatacaagccaagaaatcggatttacactagtcagttggagttggaagcggctctaagtaagctttcctcgctgcaactgcaatttaattccgattcggagcacacctatggccagcagctgatcgactgggagcagattgagcccacacatgctaagagttcagcgctgcccaaggagagactcgagcgcaagaggcagcagctagagaacttggccaatgcggtggtttccctggctcaaccgggcgaccgcattgtggacttctgcagcggcacagggcatttggccatactgctggccctcaagctgccaaattgtaccattattgtgatggaaaacaaagctttctccctgcttcaagctcagaaaagatcaaacgaattgggtttgaccaactgcgttttttaccaatgcaacatagattactttgtcggaggattcaagatcggggcctctttgcacgcgtgtggaacggcgacagatatcgttttgcagcagtgccggagagccaaggcacattttgtttgctgtccttgctgctacggttctctgcagcccatgcctcacatttcgtacccattgagcaaagcgttccaaaaggtgttagacacaaaggactacttgtacattgcccactcggcagatcaggcacacgagatggggacaaccaactgcaagccagaaaccacgcttcaaggactccactgcatgtccgtggtggacaccgatcgcctgctgcaggcggaggaggcgggctaccaggtcattctcacacgcttaaagcccgaacagtgtacgccaaagaatcacctgctagtcggacgttttgttaaacagaactgaacttacaatctgccactgagacaaaataaatgcctttttgatatgttttaaaccttagcccaccattgtggagtgttcttctttttttcgaatgatttagatgttggcttacaaaaaaacatgttttattacggacccggttggccccaatccattctgtctaaattcctccgatgcgaatacactttgttttcttctaaaccacttttaagacttctttttagtttacatatattaattctccatatgacgcttctcaagcttaatatatttgagtgaattttaaatgaatgttttccacttatgaacacgctagttacacacaaggtgttaggattgaatcacctcctcgcagagccaataccaagtgaagaacggatccaccttgcactttgtagtccgccgcggttttatcgtcattcctgggggggatcgcatgcgaaataagctaaaatcaatgaccaatagccagaaagactcacatttgcttgccggagaaaataagacgctgttgctggggcggaatgccttccttttcctccacgcgctccttgatgcgatctaccttgtccgtgggctcaatgtcgatctcgatttccttgccggtcagggtctaatggaaagataatacatatttacattaataatccagccacacatatattgactgtaatattcgacgattttgttgttgttcaaagtgcccgctgggcacgatggctgtgatttatctttatcctacttttttgctactccatatcttccacactaaccttcactttgatcaacattttgtgtgtatttaactaggcgctcctgtacaaattcaaaattgccgaaatttttgcaaatctccacagctggttctcttttttggctgtcactttcggcgttggtacgactggcaactatcgatagtactgtcgatgaccatcgattgttttccacactattacaaatatagtattttctccatcattccatctctacacaattcacgtgtaaaaaaatacattt

SEQ ID NO: 42581 - DNA, 1869 bp, DROSOPHILA
ggcccccagctggtttataattttctcgctaatttattttattttcgattttcgtttagtttccaatttgttttgatgatcggttaattaaactatggatcagttgtacctggagatcgagatcagcactcaaaaagagaccaccatttatactggtgtgtcctcgttcttggctttgtttacttacaaatttttgaaagatcccaaaaatgtgcgagtaaacttcgtttccacaaagatcgaaggcggtaaaatagctttacggagttcccaactcaaaaaggaactgaccgaccggcacatcacatgcagggatgccgcatccttgcctgccatccaggatctaaaacttccaatctacgagaaggacggaaatacattcatagcaggaacgtgtgccgtttgccgagagcttattgcaagacaaccaaatgaggaactcaagaaacttttaggctttaagggaagctgcctcttggctccgtcagaagcatcgatttggactaagttctgtgaggtggatttagtggctgttgtcagtaaacttcatagtgggcaagttttggaattcgtcccccaagaagtagtgaggttcgagcagcacatgaacgaaccggtgaggatgcataacatctataaacaggccagagagcaggccaatcagactgagaatggcggcaaggtcaagaggagagaacgagtgcaaatcaagtgcactacacctaaggaagagctgcttattgagcaccgcttcgccgagggcatcagtttcacaattgcggatataattttgtacccccttttgagaattgtcttccaacattgcgggcagatgctgccccattttccactcactagtacctggttcagcgagatcgactctttcggcgataaatgcgccagggttctaagagatctttatgtgccgcaagcaattaagacccctcccggagaactgggaatccccgactgcgaggccaccagtctgtacaaagccgatcccaagcgatacaagccaagaaatcggatttacactagtcagttggagttggaagcggctctaagtaagctttcctcgctgcaactgcaatttaattccgattcggagcacacctatggccagcagctgatcgactgggagcagattgagcccacacatgctaagagttcagcgctgcccaaggagagactcgagcgcaagaggcagcagctagagaacttggccaatgcggtggtttccctggctcaaccgggcgaccgcattgtggacttctgcagcggcacagggcatttggccatactgctggccctcaagctgccaaattgtaccattattgtgatggaaaacaaagctttctccctgcttcaagctcagaaaagatcaaacgaattgggtttgaccaactgcgttttttaccaatgcaacatagattactttgtcggaggattcaagatcggggcctctttgcacgcgtgtggaacggcgacagatatcgttttgcagcagtgccggagagccaaggcacattttgtttgctgtccttgctgctacggttctctgcagcccatgcctcacatttcgtacccattgagcaaagcgttccaaaaggtgttagacacaaaggactacttgtacattgcccactcggcagatcaggcacacgagatggggacaaccaactgcaagccagaaaccacgcttcaaggactccactgcatgtccgtggtggacaccgatcgcctgctgcaggcggaggaggcgggctaccaggtcattctcacacgcttaaagcccgaacagtgtacgccaaagaatcacctgctagtcggacgttttgttaaacagaactgaacttacaatctgccact

SEQ ID NO: 42582 - protein, 415 aa, DROSOPHILA
MNEPVRMHNIYKQAREQANQTENGGKVKRRERVQIKCTTPKEELLIEHRFAEGISFTIADIILYPLLRIVFQHCGQMLPHFPLTSTWFSEIDSFGDKCARVLRDLYVPQAIKTPPGELGIPDCEATSLYKADPKRYKPRNRIYTSQLELEAALSKLSSLQLQFNSDSEHTYGQQLIDWEQIEPTHAKSSALPKERLERKRQQLENLANAVVSLAQPGDRIVDFCSGTGHLAILLALKLPNCTIIVMENKAFSLLQAQKRSNELGLTNCVFYQCNIDYFVGGFKIGASLHACGTATDIVLQQCRRAKAHFVCCPCCYGSLQPMPHISYPLSKAFQKVLDTKDYLYIAHSADQAHEMGTTNCKPETTLQGLHCMSVVDTDRLLQAEEAGYQVILTRLKPEQCTPKNHLLVGRFVKQN

SEQ ID NO: 42583 - DNA, 2743 bp, DROSOPHILA
aacaaattaaggaatctatagctaatcataacaaacagaaaatactgagtgcactaacgatataaatagttcggaattcagcgagtccgcagctctagggactctcgctgctgtggatgcgactgtgctccaggatatccgtgttctgcatgggctccagatccgtttcggagataatctctgccagccactgctcgatttggacgggatggaatgagtcttcatcaccgctgtttgcctcgaggatgatcttgagattctcgaagttcttaaggattagccgcttgcccggctgcaattgtggtcccgattcgctgtgcgttagcgatgtggtggtcgaaactggctcctgtttggcagccgactgctttggattgcagttggcatcgcaactggaatcggcagccgatgtttgaacgggctctgccaactggttgtatgtcctgcgtggcttctctaccatgctcttcttgatctcgttgagtaggcgattgtaaaaatcgcaggtgacatcgtgaatctcggtctcctcgtaccgctgggcctgtccaggcgtaggagtggaatccgagctgggttcacgctctatcttgtccagctttttgttcgccttttgctttttggactgcgaacgggagctggcattactggagtaattggaactggaggcggtggtggtgggcgtggagttcgagggttcggtggtactggaatcggcggacttggccaggggcatctctgcactcaccgcctcttcgctggcgcagttgatggtcaggctggctatgttgcgcagattgatcgtgccattgcaattgttgattgtgatttttggcttgaagcgctgtttgcgacccttgcatttcggtggttcttgtacgctgctctttgatttggcagaggtttctcgccccaagctggaaacggcttcggcaatcgaagattccaactcgtcatccagctcctccaagtttaagggcggcacatatgtatccctcttgatcttggccttttttatcagatcctttgcctcctgcagtgtaatgttgataatggagcgcttggcattatcttcgacgagacttctgttgcgagagaagtcgaccacaatggcctctggtggggcaccgtcttcgtccagatcgagatacgatacttgcccatcctgcaggcacttgtacatggtctcgtggtcatctagtggctctatgtagtcctcgttcctcaaacccgtggtgcggtaatcctgcagcgccaactgcatatcactgttgtccagcagaaagtgtccgtagcttcggatggctgtcagtagtttctcctccgcatcctcgctttccccgggaatgaaacgcacaccactttgatctttcttgccaaccgagttcgagttctccatttcggtgggcgacttcttcagcagctgctgctgctgtcgcgtgttcgctatgacctccagttgccggagcagcaacttctcgcgcatatgcaacgcagcacggatttcattgaacttcttttgtacggtgtctttgacctgggcgatgaaaaattggggcgtgtatcagtaaacagcagtcaaaacacacagtccattcggttttagggggctgaatataaaaaaaggagagtacaaacacaaacctcatccagattcttgtccatttcgtgcgtgctactaaatactttctcctttctaaacgctgcgcattttttttcataaattcctgtgtatcaatattttttgtttgatcgatcagctgagttgcggagtgcccgccgcttttagctaataaaaaaccagaggctcacaaggactggtacttgtaactggtcacactttacatttggcgggaaaattgaatttgcaagtttgataagaacatatttcatattaagtattattttggctttatgccaaagattctggtaaagttgtatttagtaaaaacactttcatattcctcattaacgatctttctgttttactacaaaagcacaagcaaaatctagcaaaataatataggcagctctttaaaattgatgaaaggctttgtgttttatttattaaattatttaattattatttatttatttaaattatttaaaatattttgccgggttgttcaaacttttaacgttagcggaagtgcaagcgctgccaccttgttgctgcgcttaacagagagatcatacttataccgctacgacactacattgtggagtccagtacaatggaaggaattgggttttaagatttcaaaagtctgaattgttagggcaaacaataagcacaaaattccagagatgaactagtttatgattaattaagctctttagaagcatattaatttatatatcaaatgtagtggtgtcacaagcacttgagcggcttaaaagtgtgtgaccgtatggcaacagtagaacaatccacattacagagctctgttagcattgcagaagtgttttaacacacccgaaattcggacacaccgtcgtcagtttgttttcatttcaactttgcgtcgggttcactccaattttcgcaccggaggcgcgcatttcaattaaattcgggagagcgctgaatgcgcacgctgtttccctaaaagttcaaatatttaaagacgaaaaacattggtaaattattttggttatcctataaaaaaaataaaagattcgcacttgtgttgaaaatacatcggtaaatccgataaatcgccgggaaaatatgaagagattt

SEQ ID NO: 42584 - DNA, 636 bp, DROSOPHILA
aaatattgatacacaggaatttatgaaaaaaaatgcgcagcgtttagaaaggagaaagtatttagtagcacgcacgaaatggacaagaatctggatgaggtcaaagacaccgtacaaaagaagttcaatgaaatccgtgctgcgttgcatatgcgcgagaagttgctgctccggcaactggaggtcatagcgaacacgcgacagcagcagcagctgctgaagaagtcgcccaccgaaatggagaactcgaactcggttggcaagaaagatcaaagtggtgtgcgtttcattcccggggaaagcgaggatgcggaggagaaactactgacagccatccgaagctacggacactttctgctggacaacagtgatatgcagttggcgctgcaggattaccgcaccacgggtttgaggaacgaggactacatagagccactagatgaccacgagaccatgtacaagtgcctgcaggatgggcaagtatcgtatctcgatctggacgaagacggtgccccaccagaggccattgtggtcgacttctctcgcaacagaagtctcgtcgaagataatgccaagcgctccattatcaacattacactgcaggaggcaaaggatctgataaaaaaggccaagatc

SEQ ID NO: 42585 - protein, 186 aa, DROSOPHILA
MDKNLDEVKDTVQKKFNEIRAALHMREKLLLRQLEVIANTRQQQQLLKKSPTEMENSNSVGKKDQSGVRFIPGESEDAEEKLLTAIRSYGHFLLDNSDMQLALQDYRTTGLRNEDYIEPLDDHETMYKCLQDGQVSYLDLDEDGAPPEAIVVDFSRNRSLVEDNAKRSIINITLQEAKDLIKKAKI

SEQ ID NO: 42586 - DNA, 4346 bp, DROSOPHILA
aaaagcgcattctaaatgaaaagaagcttacttagctcatttggaacacctaaatgatattctgcaaacagtgaaaagattcttaggatcggaacacccccgaaaatgagagaaccctatcgtaatctcaagagacttacccgcagctcgacgagctgtgctgcgatcttttgtgggtcgctgtggattcgttgggcgcggccacgcccacattgagtaggctacgccgaagtccctgtaccagcagtcgcacctgagccatttctctttcttttatgctttcaccacccgcgcacgcacgtagaatttagattatttaccaacccgaaaagaaagaccttgcttgaccttgccttctcctccgccaacttgtgcgtacagcgcgctttcgagcgaatcgacagactgaagcccgtggaagttttccgtggggcgagagaaaataaatatgctcacgggccgagcatctgggcgatttgtggggccgaggggcgatcataaacgcgctaattgataagtgtgacggattatttttgaaagggggtggttgggtaaggacgtgtgtgtcagctgttcggtttgttgataagatttaatgtgcccagctgccattttgcaaattttctgtaatctaacaatattaaaatttttatttcattttaaatatttcaggttatacgatcatgctgattactcgactaaaaagtatttacaagaaacaaacatataattttaaccctaaatttgcttttattcgatacggaatcccattatatttggtcgtatttgatagcaaacacaaatgaataaagtttcgttattaattcagaactgcaagaaaaaagaccgctatcaacaatatgtgagacgcattttccaacactgaacacttcagaagcaaaacaaaaccagctgatttagcaaacaacagctagctcacagatgtaaacaacagaaatttgcaaattattacaaattattgtaccataaataccttaagatgcccgcccactgcgccgtgataaattgcagccataagtatgtgcacgcgggcagcatttcatttcacaggtaagtgagttgattttcaattgacaagattacactatagcttctattctcccaaagatttccattcaaacggaaggatcttctacagaaatggaaggaatttacccagaggagtgctcagtggatgccctcaaaatggagtgcgctgtgcagtcggcactttggtgatgaggactttaattgcagcaataatcggaaaacgcttaagaaaaatgctgtgccatcaattagggtttcggaagatgactccatgagtgggcacttggaacaggtgtccccaagcaataggccaacgcacaagcaaactctttctagtgccgccgaatcagcagcaacaggtgttaaagccacttgccgcttttgtggttcctcggccatcaattgctcctcgtttgacaagagttttgagctctttggcatgatccagaagtgctttcctacgctacagattcttcaggacgacaccttgcccaaggaaatatgccaggagtgctgcctccaattggagcgcttttcccagttcatcgatgtggtgatgttggcgcagagtgaattgcaaagaaaataccgccgacaactgaaaatcaaacaggaacccttggttcgtgtgaaacaggaggcctgcgagagcttggacaatctttttcctgatgaactggacatgggtttggagcaggacgatggctgcgatcaggaagaaactgaacaaaagtttcagttctgcgagttccctatgctaaatgcccaagacattatcaacaattgtgatatcatggagataatcaatctggacgatccgtttatcaatattccagacgatgcggatgtgggacagtcggagagactacagcctggaagaacggctaatgaaatgctgcaaaacgaactcctaaccgaagagcacaattatgcgaaggaggagtggcaactacccccgcatcagtacaaaacggaaaaggtggagggaacggatgctgcgccagacgcagctcctccgcctgctgatccccctcctcttcaggataatatagaccctccctcggcccccgaaccgcgctcatgcaagcccattgtgaccaatgtaagccagatacctaacccaatgatctgcgagctgctgccacagcctgctcctcccacgtcgatcaaacccaacatcgtggtacttaacgatagtgtggtcgaatcctcagcggcttttcggcttcacaactgcactttgtgcactgccaaatttataacaatagatagcttaaatcagcattatgcacacagtcacagtaattccactcccatggttagtgttcctccgatgaatatatgccttcccagcttaaccatgaaccctccaatgaaaatggaaagcaacagaggtcttgtggccactgaacaatccgaatactggccgttggagtggcataatagtcctgtatccaagcaacctaggaaaaagattgatatactagatatgcagagtagtttcctgcatcacaaagaccttataccgacagccactcaactgtcagcacccgcacctgatcctcaactggttgcagtgactgctagctacgctaaactggctaacaggtatcgtaagttgcagctgaaatgcaaaaaactgaagtcaccaaggaaggtgcacagaaaaacctatgtgtgccggatgtgcaggaagggattttcaaagtttaagaacttacaccaccaccgtcgtcagaaagcacactttgtaaagttaatacccaatttttcaggacgctgttctggttgcctaaagttttttcgatcccgcttgggtcttcgccagcatatgcgatacatatgtcaatcgttgtcgctcaaaaaccatcggcgccttcagagcttcaagtgtcgccactgccaggccatcgcctttgcccactggcgcctgtatcgtcgtcatgaactcaattgcaggcccaaaaaatccaaaactaaggtgcagacggcaatgaattcgaaaaagaaagttacgcccacccaagtatttgagtgtaatatttgtaaaaaatcattcggttcgctcaacggactacgccagcataacatcacccactcgacggagcggcaacacaagtgcggcatctgtgagcgggtcttcaagcgacgcaacggattgtctcaacacattaagggctaccacctgcagctcaagccgcatgagtgtccggtttgccagcatcgctacgccctgaaatgcgatatgctgaggtgcaggcattccctgcgaaaaggtccagctgccggggagtaacaggaagccctggagatgactcacgattggacaaggaaatggtatttactcaagcaaatgctataatcttggaggtaaaaccaatttgttttctaaaaaacaatgtgcgataacacgccactacaattttctttccacagatgatctgaatctcgatgcactaaatgcattaagcctagtcactctatggggtacttagttggtggtcttccagtacggcacgcaaggtgatgaagggttcgcagcgggaatgaaattggcgctagtcaaggttacttacaataagtaatttaacctaattaaaccgacgcttcattgagcaggaacgaggtttcgcaaatcggaacaacatttttgaaaaggttgaaagggggaaaactaaaggcgatcttaaatattttgtattatatacatttatttatttaaattgcagtataagtttgtagtaaacgttctctaaaagtacgtgtattttcttgtgtattcgtatttaacgcattagtattgcttaaatcgctaactttaaacgtgaaatactgaatcgaaacttattgttttactttaggctgatccaagcaaaaaactaagattgactgccaacataggattagtatatacaaagaaggttgaatttcacaagtttatttgcttaatataactatcaattttatttttaacaaaactaaaacgaagaacataaaaatggcactaaaagtacaaaatcataaagtaaaaagcatacattttggagaaccctcaaggataaacgtaattcaacaatgaaattttgcgcaacaccaaacaataaagtagttcttaatctaaaacattttaaacttaactaaaggttaactataaatacgcttttggtatgatcgttattaatgtacgtatgtatgcatatgtccctggctagagtggctcagtttggttggttttaaaaaaatatatattagaaattgaacgttatattttgttacttgataagttgtgatgggta

SEQ ID NO: 42587 - DNA, 2016 bp, DROSOPHILA
atgcccgcccactgcgccgtgataaattgcagccataagtatgtgcacgcgggcagcatttcatttcacagatttccattcaaacggaaggatcttctacagaaatggaaggaatttacccagaggagtgctcagtggatgccctcaaaatggagtgcgctgtgcagtcggcactttggtgatgaggactttaattgcagcaataatcggaaaacgcttaagaaaaatgctgtgccatcaattagggtttcggaagatgactccatgagtgggcacttggaacaggtgtccccaagcaataggccaacgcacaagcaaactctttctagtgccgccgaatcagcagcaacaggtgttaaagccacttgccgcttttgtggttcctcggccatcaattgctcctcgtttgacaagagttttgagctctttggcatgatccagaagtgctttcctacgctacagattcttcaggacgacaccttgcccaaggaaatatgccaggagtgctgcctccaattggagcgcttttcccagttcatcgatgtggtgatgttggcgcagagtgaattgcaaagaaaataccgccgacaactgaaaatcaaacaggaacccttggttcgtgtgaaacaggaggcctgcgagagcttggacaatctttttcctgatgaactggacatgggtttggagcaggacgatggctgcgatcaggaagaaactgaacaaaagtttcagttctgcgagttccctatgctaaatgcccaagacattatcaacaattgtgatatcatggagataatcaatctggacgatccgtttatcaatattccagacgatgcggatgtgggacagtcggagagactacagcctggaagaacggctaatgaaatgctgcaaaacgaactcctaaccgaagagcacaattatgcgaaggaggagtggcaactacccccgcatcagtacaaaacggaaaaggtggagggaacggatgctgcgccagacgcagctcctccgcctgctgatccccctcctcttcaggataatatagaccctccctcggcccccgaaccgcgctcatgcaagcccattgtgaccaatgtaagccagatacctaacccaatgatctgcgagctgctgccacagcctgctcctcccacgtcgatcaaacccaacatcgtggtacttaacgatagtgtggtcgaatcctcagcggcttttcggcttcacaactgcactttcttaaccatgaaccctccaatgaaaatggaaagcaacagaggtcttgtggccactgaacaatccgaatactggccgttggagtggcataatagtcctgtatccaagcaacctaggaaaaagattgatatactagatatgcagagtagtttcctgcatcacaaagaccttataccgacagccactcaactgtcagcacccgcacctgatcctcaactggttgcagtgactgctagctacgctaaactggctaacaggtatcgacgctgttctggttgcctaaagttttttcgatcccgcttgggtcttcgccagcatatgcgatacatatgtcaatcgttgtcgctcaaaaaccatcggcgccttcagagcttcaagtgtcgccactgccaggccatcgcctttgcccactggcgcctgtatcgtcgtcatgaactcaattgcaggcccaaaaaatccaaaactaaggtgcagacggcaatgaattcgaaaaagaaagttacgcccacccaagtatttgagtgtaatatttgtaaaaaatcattcggttcgctcaacggactacgccagcataacatcacccactcgacggagcggcaacacaagtgcggcatctgtgagcgggtcttcaagcgacgcaacggattgtctcaacacattaagggctaccacctgcagctcaagccgcatgagtgtccggtttgccagcatcgctacgccctgaaatgcgatatgctgaggtgcaggcattccctgcgaaaaggtccagctgccggggagtaa

SEQ ID NO: 42588 - protein, 671 aa, DROSOPHILA
MPAHCAVINCSHKYVHAGSISFHRFPFKRKDLLQKWKEFTQRSAQWMPSKWSALCSRHFGDEDFNCSNNRKTLKKNAVPSIRVSEDDSMSGHLEQVSPSNRPTHKQTLSSAAESAATGVKATCRFCGSSAINCSSFDKSFELFGMIQKCFPTLQILQDDTLPKEICQECCLQLERFSQFIDVVMLAQSELQRKYRRQLKIKQEPLVRVKQEACESLDNLFPDELDMGLEQDDGCDQEETEQKFQFCEFPMLNAQDIINNCDIMEIINLDDPFINIPDDADVGQSERLQPGRTANEMLQNELLTEEHNYAKEEWQLPPHQYKTEKVEGTDAAPDAAPPPADPPPLQDNIDPPSAPEPRSCKPIVTNVSQIPNPMICELLPQPAPPTSIKPNIVVLNDSVVESSAAFRLHNCTFLTMNPPMKMESNRGLVATEQSEYWPLEWHNSPVSKQPRKKIDILDMQSSFLHHKDLIPTATQLSAPAPDPQLVAVTASYAKLANRYRRCSGCLKFFRSRLGLRQHMRYICQSLSLKNHRRLQSFKCRHCQAIAFAHWRLYRRHELNCRPKKSKTKVQTAMNSKKKVTPTQVFECNICKKSFGSLNGLRQHNITHSTERQHKCGICERVFKRRNGLSQHIKGYHLQLKPHECPVCQHRYALKCDMLRCRHSLRKGPAAGE

SEQ ID NO: 42589 - DNA, 3508 bp, DROSOPHILA
attggtcgagtttcataaaagccagctttgtacgggcagcattttggcgggcaaaaaaatatggtttttaaataatatatttcggtcaatttatgaagctttactaaggcattcatagtattcacaaaaaaaaggtgtatatattcgcagtcgagtaaatacagtaaacgcaataagttttctttttagttattgtgctctttatttattatcaagcatcaacgcatcttaaatggatttttcgataatacggcaaataaaaaatttaaaataaattaggctgtgtaaataaatacgaaataaataaataaatattcttacaattatataaaaaaaaaattaattttttaaaataagagacgatattaccgataaaagacgaaggataaaaaataagaaataaaggaaaatcatgcgaaataaaaatattaacaatcgcaagtcaatcccaacccatttaaaatattgaacgcatccgttaattcgaagataagatccacagacatttgcaagaattcggttaagatgtatattttaggggaacagattaaattgcacttgctaatacaattattgacttttaaattacatttaataacaattttctcgggtggttaaaactatttacaaacataagagggcgcattgaccactttgccatttctcaaggagttatacatttttttttttggtttgcctctagagtctataccaacaaaaagatgtgctgcccgccccgtttttctgcgccttcaaatcgccaagaatcttaaaatttcaattagcttaaaaaaatcacatttgatgtatcttgtatccggttctacgactccaacttaatgcgccgaatgcggaaggtgccaactacgcgctacgttttaaagtaacagcaaggacctcgcgtcccttttccatcggatcctgccactctaacgctaataaattcgtctctatcccacgatcgcctcggtgcttccctgtcattccagccaatggccatctaatgctccgagctgaagtacgagttctgcatgagatacagcttgtcgatggggtttatcaggctgttgttcaggttggccagcatgtcgtggggattcgagtgggagtgcgagtgctggttgcccgacgagctggtggactgcagctccaggttgttcagcgacagcgagtccgcatcgtcatccaactggtcaaagttgctcccatccagcgagaggtccgagctgcagaagctgtcattcgagttggccggatagtctgttgaaaagcaagccattagtacttgtagaataatgcttggacgaaatcaaacttcaaatcgaaccacttaccatccggtgagaagggcaaattgggattcagcggctggctggcgaaagtgctgtccaatccacccaaataaccggagctatctcctccgagctcctgcttgacgcacttgtcctccttgtcattggtgtccttatcgtcggtggcgctggaattgcccgtgccacgcccactgcccgatcctccgccggagccaccattctgcttggccttgcgctgaatcttcttcatcttggcgcgctgattttggaaccacacctgcactacacgaaccgataggccggtgtccttggccagggcttcgcgcactttgcgacatggtttgggtgactgatcgaaggaggccttaaactgtttgcgctgctgcgatgtgaggatggtgcgtggtcgtttcggacctctccttccatcccgtggcctcagcaaatcctcctcgtccaggccaacgaacccacagtgctgagcagcagcggctgccagaaacatctccttctccagatcgtgacgatagcagaagagctggccatcgcgcagcatgaactgctcgcccttctggagcggcaatcggcaggcgtagcaaacgaagcagggcaggtggaagacaaagttcggtatgggtcgcattaccagctcctgcggcaggatcgcatggcagcaggaggagcacttcacaccgaacagccggtcgtagtccatcttgcaatagagtttcgagttgcgcacgtagcaggtgtggtgcagctgcattccgcagtagcagcaggccaggcactgctcgtgccagttggcatcgcccacgttcatcaggaatcggtcatggatcttctggccacagccctcgcacagctcgaagttcttctcgcacttgatgtggcccacttctggggatgaaacaagcaaagatgggggaaaaaagtcgcgttagtaagtcgcagaatacatttcaagtaactaatacactgaggtttaaaatataataaatatatctatctacattaataatcaatttaatcgaatatttaacccatacttggaaaatatatatgaaacattttcttgagaacagaaatatttcaaagaagaatcctaatactttagtaattttgttccagtgtaactccgcttattcgccctactgtgatgggcgtacgtggcgtatacgtgatggcggcacatgtcgctgcgaaattatcatgacatgtgctgccaatggagcaaggagcgcgctgacaatcgaatcgtgtgaaaatgcttcaacgtctctcttgtttttccgttcgctgtttcgcactttcgatggaaaaacagaaggaaaactcttcgctggaaaaaattatctgtcgtcggactgcaacagcttgtattgaaagcttattgatgcgtaattgaaacgtaaagttttccgtatttgttcggtattattgaacagccccccatctcgattatcaatgtatataaacatgccagaaaatggctcaattgatattgtatataccaccgaacttaagccaaagcttaactcctaaacaaagtcccttaaaaaatgctaatctcccattgaggagctactggatttcagctcgccttacccaaagtagaacgaacctaatcctcccgtagacggagctcttgaaactgtaaaccagtcataaaaagtagtacccgaaaaacacaacaaaagctgcatgcagtaaacataaaaaatatatgacgaccgccacgaaaaatgtatggaagcatttgaaaaatgagcagcgagttgggaaagtgcggagggaaagtggagaaaaagtgcggagggaaactggcaatggaagtggagtgttatattatatggctgtggctcagtggcagaaaaatgtgcatgatttatggttggcacaatggcctccccacacacacaaacgcacacagtcgccatatctacgcgaatgtggctgtatgggtgatatatagtctgggaatagggacgaaaatccctatgtaagggggcgctaagccagtgcagcggaaagttgacaatgtcctcgggcattttcctattttccttttttttctgttttttggcttgcatttcatcctattgtgcagtatccatatccaatcgcattggcgataaaggtttttgcatgggccgagcaaaaaatcaagaatgattcatttgataaaccccaga

SEQ ID NO: 42590 - DNA, 1179 bp, DROSOPHILA
atgtgccgccatcacgtatacgccacgtacgcccatcacaaagtgggccacatcaagtgcgagaagaacttcgagctgtgcgagggctgtggccagaagatccatgaccgattcctgatgaacgtgggcgatgccaactggcacgagcagtgcctggcctgctgctactgcggaatgcagctgcaccacacctgctacgtgcgcaactcgaaactctattgcaagatggactacgaccggctgttcggtgtgaagtgctcctcctgctgccatgcgatcctgccgcaggagctggtaatgcgacccataccgaactttgtcttccacctgccctgcttcgtttgctacgcctgccgattgccgctccagaagggcgagcagttcatgctgcgcgatggccagctcttctgctatcgtcacgatctggagaaggagatgtttctggcagccgctgctgctcagcactgtgggttcgttggcctggacgaggaggatttgctgaggccacgggatggaaggagaggtccgaaacgaccacgcaccatcctcacatcgcagcagcgcaaacagtttaaggcctccttcgatcagtcacccaaaccatgtcgcaaagtgcgcgaagccctggccaaggacaccggcctatcggttcgtgtagtgcaggtgtggttccaaaatcagcgcgccaagatgaagaagattcagcgcaaggccaagcagaatggtggctccggcggaggatcgggcagtgggcgtggcacgggcaattccagcgccaccgacgataaggacaccaatgacaaggaggacaagtgcgtcaagcaggagctcggaggagatagctccggttatttgggtggattggacagcactttcgccagccagccgctgaatcccaatttgcccttctcaccggatgactatccggccaactcgaatgacagcttctgcagctcggacctctcgctggatgggagcaactttgaccagttggatgacgatgcggactcgctgtcgctgaacaacctggagctgcagtccaccagctcgtcgggcaaccagcactcgcactcccactcgaatccccacgacatgctggccaacctgaacaacagcctgataaaccccatcgacaagctgtatctcatgcagaactcgtacttcagctcggagcattag

SEQ ID NO: 42591 - protein, 392 aa, DROSOPHILA
MCRHHVYATYAHHKVGHIKCEKNFELCEGCGQKIHDRFLMNVGDANWHEQCLACCYCGMQLHHTCYVRNSKLYCKMDYDRLFGVKCSSCCHAILPQELVMRPIPNFVFHLPCFVCYACRLPLQKGEQFMLRDGQLFCYRHDLEKEMFLAAAAAQHCGFVGLDEEDLLRPRDGRRGPKRPRTILTSQQRKQFKASFDQSPKPCRKVREALAKDTGLSVRVVQVWFQNQRAKMKKIQRKAKQNGGSGGGSGSGRGTGNSSATDDKDTNDKEDKCVKQELGGDSSGYLGGLDSTFASQPLNPNLPFSPDDYPANSNDSFCSSDLSLDGSNFDQLDDDADSLSLNNLELQSTSSSGNQHSHSHSNPHDMLANLNNSLINPIDKLYLMQNSYFSSEH

SEQ ID NO: 42592 - DNA, 3237 bp, DROSOPHILA
tccctgctattgaaatgtgtagtaatgaaaaaatgtcagcttacacgtggcaggacaagggaagttggtagctgtagctgtagctacggccaaagctgaagctgaaactgaagttgaggcagacactgaaggtacattcaacaaaagcgacagcgacaacaaaacatgtgtcaactgccagacatcctgagcaatattaataacactcggcgaacatatttttcattaaagctgcaatgggacgtcacacagcatctgagcatctgggcgagcttactctttaaggatgattatgctaagctttcaacacacactcgcccccaagctcacagacctgcaagagaaaatttaataaatttagttaggaggacgattagcggccattttgcactcctcccacgcgcaggacggcctaacaaagtttctgagaaacccttcgtgccaaactcgagctgatgtttttctcctgccgcgctgcaatcacaagcaaacagtgtggccccaggcgaagttaaggcggcgcggccaacgctacgtatgaggaacgtcttaattgccattaaggacccgtctggtattttcgcaaacttttccatattttatgcatgctggaaatccagcatgtgaaaacgagtacagcacgaccgatgcagtttcaaattcaaattcgtcaaatcggaagtcgggcaacaacactgaataaatgtttgttctagtcaagtgctttcactggttaattaaacataacatagcgcagcagagaaattctcaagttaataattaaacaacagcaagggccataaacttaatgaaaacttttcgagctcattgaaaacttcatctataaaaatgtcacaagttcgaaaggaaccggcctatataagccgtccaccagagcagtgcgcacaataacgccgagatggtcttcgagctaatacgtcccgctccgctcacggagcagaagcggtcccgagatggttgcatctacctttaccgcgccatgaagtttattggatggctgccccccaagcagggtgtgctccggtatgtgtacctcacctggacgctaatgacgttcgtgtggtgtacaacgtacctgccgcttggcttccttggtagctacatgacgcagatcaagtccttctcccctggagagtttctcacttcactccaggtgtgcattaatgcctacggctcatcggtaaaagttgcaatcacatactccatgctctggcgccttatcaaggccaagaacattttggaccagctggacctgcgctgcaccgccatggaggagcgcgaaaagatccacctagtggtggcccgcagcaaccatgcctttctcatcttcacctttgtctactgcggatatgccggctccacctacctgagctcggttctcagcgggcgtccgccctggcagctgtacaatccctttattgattggcatgacggcacactcaagctctgggtggcctccacgttggagtacatggtgatgtcaggcgccgttctgcaggatcaactctcggactcttacccattgatctataccctcatccttcgtgctcacttggacatgctaagggagcgcatccgacgcctccgttccgatgagaacctgagcgaggccgagagctatgaagagctggtcaaatgtgtgatggaccacaagctcattctaaggtaagaagagcgtgtagctgcagatggggcaacttaccattatgtttcccgcagatactgcgcgattattaaaccagtaatccaggggaccatcttcacacagtttctgctgatcggcctggttctgggcttcacgctgatcaacgtgtttttcttctcagacatctggacgggcatcgcatcatttatgtttgttataaccattttgctgcagaccttccccttctgctacacatgcaacctcatcatggaggactgcgagtccttgacccatgctattttccagtccaactgggtggatgccagtcgtcgctacaaaacaacactactgtattttctccaaaacgtgcagcagcctatcgttttcattgcaggcggtatctttcagatatccatgagcagcaacataagtgtaagtggtcgccactgtaatacatgctcctcgaattgtatctcattttctaccccatcactaggtggcaaagtttgctttctccgtgataaccattaccaagcaaatgaatatagctgacaaatttaagacggactaaggtggatggataccttttttgtcctttattggatactctgcacccccgttcttccctaaaacgagacccccacaaacaatatatttgcaaaatgtttgcttaaataggaattttttagaattctctaaataaagacttctattagcgatttcacgcaaaactgccgcggacacacttttgagaaacgattttatttttatactcattactcgtagagataaagggtatactagattcgttgaaaagtatgtaacaggtagaataaagtatatatattctttatcaggatcaaacgccgagtcgatcgccggattgtactccgtatgaacgtcgagatctcaggcactataaaaatagatttagcatacatatcatcaaaccgcccaaaaatgcaaagcccacacttttgaaaaatattttcacatttatattagtcttgtaaatttctgaaacgcccacacttttaaaccaattttgaatttttgttcattatttattactattttttccctatttctaccgataatccaaaaaatttaaatttctccttcccacttccagctgagtaacacgtaactgatagtcgggaaactcgactacagcattctctcttgttctttataatattttgaactgtcactttctatcgatttcctatctccactcttacgccctttcatgagaacttagaaaaaatgttgggttttgttacgatattgctgccaaaatgttatctatatacttacattgcgttgcaaaataccatcctaacctaccttgagtccttcatttcggtttaggtcaggcgacctgaaattcagatttcaggatcataatttatagcttcagatctaatcagtgtatttacctttgtcgcaaaaaaataaatatacactgtatatgccctaaaggcatgggtaatatcacattcaaaatagtatttatgtacttgaatgagggggaccatataaaagcaattgggaccggcacgactagatgg

SEQ ID NO: 42593 - DNA, 1119 bp, DROSOPHILA
atgaagtttattggatggctgccccccaagcagggtgtgctccggtatgtgtacctcacctggacgctaatgacgttcgtgtggtgtacaacgtacctgccgcttggcttccttggtagctacatgacgcagatcaagtccttctcccctggagagtttctcacttcactccaggtgtgcattaatgcctacggctcatcggtaaaagttgcaatcacatactccatgctctggcgccttatcaaggccaagaacattttggaccagctggacctgcgctgcaccgccatggaggagcgcgaaaagatccacctagtggtggcccgcagcaaccatgcctttctcatcttcacctttgtctactgcggatatgccggctccacctacctgagctcggttctcagcgggcgtccgccctggcagctgtacaatccctttattgattggcatgacggcacactcaagctctgggtggcctccacgttggagtacatggtgatgtcaggcgccgttctgcaggatcaactctcggactcttacccattgatctataccctcatccttcgtgctcacttggacatgctaagggagcgcatccgacgcctccgttccgatgagaacctgagcgaggccgagagctatgaagagctggtcaaatgtgtgatggaccacaagctcattctaagatactgcgcgattattaaaccagtaatccaggggaccatcttcacacagtttctgctgatcggcctggttctgggcttcacgctgatcaacgtgtttttcttctcagacatctggacgggcatcgcatcatttatgtttgttataaccattttgctgcagaccttccccttctgctacacatgcaacctcatcatggaggactgcgagtccttgacccatgctattttccagtccaactgggtggatgccagtcgtcgctacaaaacaacactactgtattttctccaaaacgtgcagcagcctatcgttttcattgcaggcggtatctttcagatatccatgagcagcaacataagtgtggcaaagtttgctttctccgtgataaccattaccaagcaaatgaatatagctgacaaatttaagacggactaa

SEQ ID NO: 42594 - protein, 372 aa, DROSOPHILA
MKFIGWLPPKQGVLRYVYLTWTLMTFVWCTTYLPLGFLGSYMTQIKSFSPGEFLTSLQVCINAYGSSVKVAITYSMLWRLIKAKNILDQLDLRCTAMEEREKIHLVVARSNHAFLIFTFVYCGYAGSTYLSSVLSGRPPWQLYNPFIDWHDGTLKLWVASTLEYMVMSGAVLQDQLSDSYPLIYTLILRAHLDMLRERIRRLRSDENLSEAESYEELVKCVMDHKLILRYCAIIKPVIQGTIFTQFLLIGLVLGFTLINVFFFSDIWTGIASFMFVITILLQTFPFCYTCNLIMEDCESLTHAIFQSNWVDASRRYKTTLLYFLQNVQQPIVFIAGGIFQISMSSNISVAKFAFSVITITKQMNIADKFKTD

SEQ ID NO: 42595 - DNA, 2787 bp, DROSOPHILA
gatatttgctagataagatcgtttaaagttggtctcccgcttcactttttagatccaccgtcttacagcaaagattatctgcctttggagccatagctgggatctttagcatctataaccagggattctatgatcaagtcttgtctctacctatatcaaaaatattctttttgctgcgctttgggctcgatgacaatgcacctgcacaacttgaggttgtgagccgagcattatcaaacctgttctataacgaaaccgacgaagtgcttctcgatcacgttcatgacaatgcctactgtcattggcaaccaacactagaggttttggggaacggcagtgatggcaatggggaagatacagataccaactccatagcattcctgcagcgttacatgaagctactgaccaccagtaaatctgtgcgtgcagaagtggatgaagatgaatcggaaagtcgcacgtcaatggatgactttcaactggctgaaacagatctcatggactgcctgctaagaacaaatatattgcaaaggattcggtaagcagtgaaaagtgttagagctacagctatttctaatgcacctgtttttagattcatcttggtctctgtgaaaccagataatagcacagtggagtcctgtctgaaattacttataaggatagctcgtacaagtaccaaagtggctcgtcagttggccaatgagagccatcttatagatacactctttaaacattttctaccctcttcgagtggaagcaatcagttctatggccagccgcaagttctatttctaaaactaatccgagtgttgatttgccaccaccttgatatagctaagggtatttccaaaggagtcctcattacgcgacttcaacaatacctgttccttcaagacaataaggtttgtatgcgtacacttttgtcaaagtaattttattttttttattttttttatctctttggtaggtccagatggtgcgcattcagatcgaggcactgcgcatcctgcgctgtttgctgctcttgggaatcgtggatcgggatatatttaggttggttagcgctacccaagtagcactattatctcttcccatatgaattttccgtttacagcaatgtagcacttgacggtttcataagcggtatcacagccatcttttccctctgaaaagagctacatttgagtttgttctaattgttaaaaacactttgcatactctgagttccacatgaactgactaatccgttaatcgttttgtgtatttcctcgggtaaaacctccaacagtgcttccaagtgcattatgttttgtgaatcaatctatagggaaagtgattttctattattaagaaattatttcaatttttgtaaggatcacaaaccaatccgaacatatcaaacatgcagtagagaaaacacttgatctcgggatctgtaggtagtattctatttttcaccgacttgtcaatcacatctgtagtgtagggtatataaaccatttttgtttgaatttccaccaaaaaaaaaaggcttacttacctacagaagctcctgtctgatttaagcatcgcattcgcagctttctcacctgctttatgatcgtaggattaatttccacctaataagaggcacaacaactaaataaattttccaattattgcgtggcagcaaatacttactccttgattactaggaattaaatcatatagtatgagtagtgctaaaaaaaaactaaaatgccttgcaaccatttttgcttctccccaaaaattgctaaagttgaactgagtgctttttaggctgcgcctcatttttatagtcaaaccaagtagtaataattactatgattttgtgtaatttataggcagttcctgcccgcgctgcgacagctactggactggcatggcaatcactgcgctttcgatggagtgggaggatccgggctggtgcggcaacacgcagccgccctgctggtcgcactggtggccagtggcgagagcggagcatgcgatgtcgagggacagaagctgctcgtggagccgcttaacaactgctgctgcggctggatgcatgctgcttcccgcgtcgcgaagatcaaagatgtgagtgcctatatattcattctgctatatataataaattcaaactaattcttaatatctagtttagccagatgacgcttctgagcgcagctctatacgccgtaggctggttttctcggaacagcttgttgggaacgaccagtttcctgccctttctgcgcagcatccttccgaaatttgtgcagtccagcggatttatagcttgcgtacatgacctagtgtaagttgatcgtgcaagaccttaaatcacgcctaatttaattgctatattccagcaagggctccataatgctgagacgccccattgatcggcgacacgtgcatgcgccgttgcctaacgtgggcgcagtgctgatgcacgactacgggccgcagctggttgtcagtgagacgtatccggtgcacctgttgagtaacctgtgggccctgctcgccatttcgctggacagcggtgagaagccattattcgaggcgcttatacaaccagcagtgctcgaacctctggccgaatatttacgccagctgagcacacagctgaatcgcgtcctggccaccaacttctttgcccgcagcgagctgaggttcatccatcagctgcttacaacagatggaatcgagatctatctgaagcgacagcagatgctgcagttggtatacaattacctatgctgcctgtccactgcc

SEQ ID NO: 42596 - DNA, 546 bp, DROSOPHILA
agttcaactttagcaatttttggggagaagcaaaaatggttgcaaggcattttagtttttttttagcactactcatactatatgatttaattcctagtaatcaaggagtggaaattaatcctacgatcataaagcaggtgagaaagctgcgaatgcgatgcttaaatcagacaggagcttctgtagatgtgattgacaagtcggtgaaaaatagaatactacctacagatcccgagatcaagtgttttctctactgcatgtttgatatgttcggattgattgattcacaaaacataatgcacttggaagcactgttggaggttttacccgaggaaatacacaaaacgattaacggattagtcagttcatgtggaactcagaagggaaaagatggctgtgataccgcttatgaaaccgtcaagtgctacattgctgtaaacggaaaattcatatgggaagagataatagtgctacttgggtagcgctaaccaacctaaatatatcccgatccacgattcccaagagcagcaaacagcgcaggatgcg

SEQ ID NO: 42597 - protein, 148 aa, DROSOPHILA
MVARHFSFFLALLILYDLIPSNQGVEINPTIIKQVRKLRMRCLNQTGASVDVIDKSVKNRILPTDPEIKCFLYCMFDMFGLIDSQNIMHLEALLEVLPEEIHKTINGLVSSCGTQKGKDGCDTAYETVKCYIAVNGKFIWEEIIVLLG

SEQ ID NO: 42598 - DNA, 4669 bp, DROSOPHILA
tccggctaacccgccgttgacgcagtccacccagtgaacaaagtgtgcagcacgttttcggtcgacagtttgttgtggcgagaaaaaaaggtaatatgaatgatttggaatcaaataaatattttgcttaaaataaaaactaattaagtcttgcaatctaataataagttattcatttagcctgctttagttaatcaattaaattgttagcctacaccatgccctgaaaagtatgctttgcattttctgccaaaataaccctcatccgccatgtgtgctgggttgtttcatatttgcgcctaagcgaattgatttgtatgcctgtgtatgagtgagttcctgtgtctgtgactgagggtgtgccagtgtgtgtgtgtgtgtgtgtgtgaaagccagacatggtcacgccgtccgtccaaatggcggcacgtcgatccggcttgtcgcttgggctgcctgacatttgccgcagccagcgcgccaccaatccctcatccccttgctacactcagccccctccctccgcccacgggcccatccacccaacgcccactggcaacatgcctccgctgcgtcgttaagctcttcgccaaatctatgtgtgtttgtgtatgtgtgtggaggtcggtggggcaaccattaccacaaccaccattaacgtggcaggcagccaggcgttgctgttgctgccacatccacaggctttgttgctgttgccgctcctgctgattgctagagctgttgttgttgctattgttgttgttgctgctgctgtcgctgatgtttttgttgttgttccttttattgtcggttgactccaatctgctttggttgctgcgccacacgacgatggctcgtgccactgccaacagcaaaagcagcagcagcagcagcaacatgagctaaccaagcatttcagtcgggaaattttgcacaagccaagcgcacgcggcagcggaaaatcggaaaaccccattgccagccagacagccgacaggcgacgaagtgaaaagtcgcaattgtttcgctgctcgccgtcagttagccgtgaatcctcgaacagaacggacgcgtgtcctcctcgtcgagtggaatttgaatcctgattccaccaccaaaaagacgtgattgttggcgggtggattctaaactgaaagtttcgaaaatattaaacccaaatcaagccaaattgagaaaacgaggcatttcattctaattgacgacgggcaacgaattcttttggatttcgtaaaaatgagaaaatgacagcaaaacgtgataaggattactcaaaaaataaatcagcacctggtaataaacaagtttgtgctttataagttgaattctatcagaaaataggacttagaagttcaaaatgataagctgctcttttaaacgtgtcctaaacttctaaagtgaaatgtgactaataaatatttggcaaacaaaattatagaaaacaagtttccacaaaaaaaaaacgtcccacatggctcaccattgtttaatatatttatatttacttagtgaccattaaacaaaagttaaaataatagaaaacatacttttgcaaagaaaaagccacctgtggccaagaagtatcaaattaaataattttcaaacaataaaaaatttttttgattacttttataataatcttaaacaaaaagcaaaatgaaataaaagcaccaaagtgtcttgaaactaaacatgaagctccattatgctcacaactcggaactcgcaacctcaactcaaaagaatttcatttgagtttgatgatatatagatatagatgtttaattttaaaaccgaagttcgttgaatcaacaaaaaattgataataagcaaaataatgtaacttgaaaaactgaacatgagaatttcaacttcaaaaagttctgaaacgaacgagataactttgtttataaatgattaaattacaaaaaactttcaggttatagcgataattgtattaattattgacccttctgtatttccgccaggcatcggattcaccgccgccggctcaactaatggcagcggcataaagtccatcgggctggtgagctcaacgcagaatgtgacttcgtcgcaggacatcagcaagcggacaaacaaaccactcatggagaagcgccggcgggcgcgaatcaaccagagcctggccatcctgaaggccctcatcctcgagtccaccaagacccaaaatgccaagaacggcgagggccaggcgaagcacaccaagctggagaaggcggacatcctggagctaaccgttcgccactttcagcggcatcgcaatctcgacgatcccagtaagtttccatataaaagtaaaaattttcgtattatgactttacattttcgctacaaaatgtaattttataaatacatcttgaagaacatatctgtatctaaaataaaattcattaaatttaggacctaggcaaacttcttatattgaaacttagataataacattcaaatcctgattttctttcagcggttaacaaatacagagctggttacacggactgcgctcgcgaggtggctcgttacctggccaccccggaaccgccgcccatgggcaccatgcccaccttggcggagcccggctccaaggcgcgactgctgcgccacctggaccagtgcatagccgagatcgacgtggagatctgtccccattcgacggccgcgtttgccgaaagccccagcagtagcagttgcttcgacctgaatcacgggaagaagtcgcagcccgaggagcattcgctggactacagcagccaggattcgaatccagtggactacagcaagggtctgaaaatggtagccgctgagcagaggacgctgcccgtcacgccagcaccccaggatgagaacaacaatcgtggactccaggcgcaggcgcaaactccgataccaatacaggtgcaaagccagacacaaggccagacgtcgccgcatgtagatgccgtcgctcccagcgagctgagctacgaggaggatcgcaacaaggtgtgcgccaatgtcctggagcagtacaagcaacagcttaaggcgcacgtgcagcagcaaccagagtccgccaacggagtcctggtcctgccgccccactatgtccagctggcagcggcccttggccttagtgcccagccgctggtggatccgattgctacccgaacggattttgagcggttgatagagttgcaacgggttcaaccacatttggccggcaagttgagtcccagttttccgggaggcttggaggctgcccatgtcgctgccgcagcagcggcttatgccaacagcatggctgtggccgcttcagcaggagcctcagttgcggcaatggctacttccggtgccggaacgccaacggtgcaccaagagagacctgcctcggtggcagcgtctgtcagttccggcgtctcgatgtcggaactgaagtccatgcccgccacgcagcaatcctcaccaagatccgagagtggcatcggttccaatgagaacgaggctccggcgaccagtccgcgaccccagacaagcaacgccgctcgtcaggctctaaggcaacgccaggaggaggagtatcactacatggcccaggcggcagctgctgcagcagcagctgggcaagatgagagcatgtggcgaccctggtgagccgttaggtcagagatcctacgtactaagtatgtagacaccaccagttagttaggggagaaccagccggcagccggcggtttgctgcccccactgatcgccaagtagaggatgacacctattgttattaccgctcgtctgtgtagctcctgcatctctccaaattgcatttccaacctgtgccaacgcccaagactctctacaagatgggttccagagccaaggagagctaccctttcatttatgtatgcatttgtttttgccctgaactctgcgttaaatgtatttaattcaatacataaagcaaaaatatttacaaaaaaacttgaattctgttttgaaagtggtcggggtacgggaaaaattacgttcttgtttttggtaattctattgaatcattttagcaattttattaaggtatgtactataaatacgatatagatccttgcggaggtccaataaatacttgtattatatattagttatataagttttcaaacaagaaatgagacttagcctactcttcaggttcatgctttctactttgatttcattgcacttagggatttgcggggcgcggactgccgctggcgggcaaggaatgtctggccagagcccatcaatattgccagcttagagtcgattgcatcacgctgggcattgacacccagtctgtagaaagcggaggtcatgagttgctcctccatcacactcatcttcggcttgggctcctcctcgacgagatcagcactcttttccagtacgctagcatccagagctgaaatttcaacaattattgtaaatttttgttatattttccagcacttaccactggcaattcgaggatctatgcttttgatcacctccttagctttctccacgcattttcggtatttggcgtcatacaccagaatttcctgctcacgcgctgataaattggtttccagctgagtcaccttgcattgcagagacgtgctctgggtaactgcttcctccagtt

SEQ ID NO: 42599 - DNA, 1786 bp, DROSOPHILA
acgaagtgaaaagtcgcaattgtttcgctgctcgccgtcagttagccgtgaatcctcgaacagaacggacgcgtgtcctcctcgtcgagtggaatttgaatcctgattccaccaccaaaaagacgtgattgttggcgggtggattctaaactgaaagtttcgaaaatattaaacccaaatcaagccaaattgagaaaacgaggcatttcattctaattgacgacgggcaacgaattcttttggatttcgtaaaaatgagaaaatgacagcaaaacgtgataaggattactcaaaaaataaatcagcacctggcatcggattcaccgccgccggctcaactaatggcagcggcataaagtccatcgggctggtgagctcaacgcagaatgtgacttcgtcgcaggacatcagcaagcggacaaacaaaccactcatggagaagcgccggcgggcgcgaatcaaccagagcctggccatcctgaaggccctcatcctcgagtccaccaagacccaaaatgccaagaacggcgagggccaggcgaagcacaccaagctggagaaggcggacatcctggagctaaccgttcgccactttcagcggcatcgcaatctcgacgatcccacggttaacaaatacagagctggttacacggactgcgctcgcgaggtggctcgttacctggccaccccggaaccgccgcccatgggcaccatgcccaccttggcggagcccggctccaaggcgcgactgctgcgccacctggaccagtgcatagccgagatcgacgtggagatctgtccccattcgacggccgcgtttgccgaaagccccagcagtagcagttgcttcgacctgaatcacgggaagaagtcgcagcccgaggagcattcgctggactacagcagccaggattcgaatccagtggactacagcaagggtctgaaaatggtagccgctgagcagaggacgctgcccgtcacgccagcaccccaggatgagaacaacaatcgtggactccaggcgcaggcgcaaactccgataccaatacaggtgcaaagccagacacaaggccagacgtcgccgcatgtagatgccgtcgctcccagcgagctgagctacgaggaggatcgcaacaaggtgtgcgccaatgtcctggagcagtacaagcaacagcttaaggcgcacgtgcagcagcaaccagagtccgccaacggagtcctggtcctgccgccccactatgtccagctggcagcggcccttggccttagtgcccagccgctggtggatccgattgctacccgaacggattttgagcggttgatagagttgcaacgggttcaaccacatttggccggcaagttgagtcccagttttccgggaggcttggaggctgcccatgtcgctgccgcagcagcggcttatgccaacagcatggctgtggccgcttcagcaggagcctcagttgcggcaatggctacttccggtgccggaacgccaacggtgcaccaagagagacctgcctcggtggcagcgtctgtcagttccggcgtctcgatgtcggaactgaagtccatgcccgccacgcagcaatcctcaccaagatccgagagtggcatcggttccaatgagaacgaggctccggcgaccagtccgcgaccccagacaagcaacgccgctcgtcaggctctaaggcaacgccaggaggaggagtatcactacatggcccaggcggcagctgctgcagcagcagctgggcaagatgagagcatgtggcgaccctggtga

SEQ ID NO: 42600 - protein, 507 aa, DROSOPHILA
MTAKRDKDYSKNKSAPGIGFTAAGSTNGSGIKSIGLVSSTQNVTSSQDISKRTNKPLMEKRRRARINQSLAILKALILESTKTQNAKNGEGQAKHTKLEKADILELTVRHFQRHRNLDDPTVNKYRAGYTDCAREVARYLATPEPPPMGTMPTLAEPGSKARLLRHLDQCIAEIDVEICPHSTAAFAESPSSSSCFDLNHGKKSQPEEHSLDYSSQDSNPVDYSKGLKMVAAEQRTLPVTPAPQDENNNRGLQAQAQTPIPIQVQSQTQGQTSPHVDAVAPSELSYEEDRNKVCANVLEQYKQQLKAHVQQQPESANGVLVLPPHYVQLAAALGLSAQPLVDPIATRTDFERLIELQRVQPHLAGKLSPSFPGGLEAAHVAAAAAAYANSMAVAASAGASVAAMATSGAGTPTVHQERPASVAASVSSGVSMSELKSMPATQQSSPRSESGIGSNENEAPATSPRPQTSNAARQALRQRQEEEYHYMAQAAAAAAAAGQDESMWRPW

SEQ ID NO: 42601 - DNA, 2616 bp, DROSOPHILA
gatatatcctgttggcttttaaacttgtactggcaaatatcgcaatgttttggatttgggttgtcctccgattcagacgcaaatatctgggggtgtaagtattagctgattaaattttgtattaatgcgttagcaaaaatcgtacatatacatgtagcttgaatttagatagataattatgattacatatatttacatttattatgcagcctaaatatgatactttgtaaaattatgacaaaatgtttaatatatatgtttagatttatgacagttatgtcttcctttcgattaatatttagatcccgtaacggaatctccacgctaccacgcgacccttgtgcttttttaggttatgtacatgtatattttttacctgttggtggccgagttccaggctggcgataaataggcgctcgtcctcggaacgcaaacgatccctgatcggcactgttatcatttgagatccctcgtccaaaattttcagcgtatcacatgctataaattggccgaatttagaaagaattaaaagttaacggtaaagtgcgtaatagaatagcagagacaccaacactacggcgcccagcagcactcacacacacgcatgtgggaggagagcatgcaagcttaccgctcagaattctgattgaactgtccgtcacttcgtcctgcggctccatcttgatcttgatgtcctccatgtcaatttcccccttggccagcgccaaattcgcgagaattccgttctgatcagaggatatcagatcaacaactatcaatataaagaagagagcagcagcgcaataaataccgctgtataccgctgcgatcagaagacgactatcgataggcgcggcgttgccagatcaagtggcgcaattatcgggtggagcggtcagccttcaccacttggggtggttatcgattgacgatagccctcgcaatttgggaaagtaaacaaaagcaaatccgttgaagaaatctgttaaaaatccaagatatgagcaatagcgaggactcgcagcagtatctgaacgacatgctggtcaaggaggaggacgaggcgtccggcggtaaacaaaagaccatccacaaccgcgtgttttgttgcttgactttgatttttcacccccgcagacgattcggacaaacaggatggagggataatgctacgcgaacaggaccgatttctgcccatctgcaacatcattaagatcatgaaggttccggtgccccagaacggcaagatagccaaggatgcacgagagtgcatccaggagtgtgtctccgagttcatatccttcattagcagtgaggccatcgaacgtagcgtcgcggagaatcgcaagacagtcaacggggacgacctgctggtggcgttcagcaatctgggattcgacaattacgtggaaccactgtccatttacctgcaaaagtaccgagaggtcagtgagattacgctatgcacagcagttaataaccaagtaacccattgcagtcgaacaaatcggatcgtaatctctttctggacgccagttatccgcacaacgaagatgggtcctccgcaaacgatgcggggaaacagtaacccctttcttacttaccctgttagttaaggttcttttgacattaaggaaatatttgtctaattcaaagtgttttgtttaatcctaacagtacaccttgattgactatttaagttaatattatcattactattctttctgattatttaattttttattttgtatatatgatatatgattttattttaattgtaaccacagattttatatgcataaatccatttttactctcccgatacatagtcaaattcaatatttaggtcttggtactggtagcaaacatgaatttatgtatcgcgggcccattaagccaaattactgatactcttatataaaataaatatgtttatttagtaaacattaatataaaaactagatttgttgttggtaagggctaatattgtgaaatattaaaaacattttacgagttatcttaattgtagatcattttccgtagctgtagctgacaaggaacgacattcacatacttacataagtaatagaaagtaatacaagcaatctgctaaaaattatattatcctagccggtatccttcactgccctaggaaaccgggacggaggctttctcttcttggctatccactcactttcgtaaattacgagtggagcgttttcgatcccaagggcgcccttctcaagcgaagcgatggcactgcccacctttttaccaaagacactagaataacaagatgcgtaacgccatacgattttttggcacacgatttttttgccgtggctctagaggtggctccaggctctctggaatttttgttagagagcgagagagcgaagagcgctacagcgaacagctcttttctacgcatacagtgataacagacaactttatgtgtgcacacgtatgctcatgcattgtaaatttgacaaaatatgcccttcaccgtagaagttcttagactttaaatctatattatttttgatcaattggcatcatgcgaaaaattcttgtttgcattgccttaacgttattattatttgaaaacagattaga

SEQ ID NO: 42602 - DNA, 552 bp, DROSOPHILA
atgagcaatagcgaggactcgcagcagtatctgaacgacatgctggtcaaggaggaggacgaggcgtccggcgacgattcggacaaacaggatggagggataatgctacgcgaacaggaccgatttctgcccatctgcaacatcattaagatcatgaaggttccggtgccccagaacggcaagatagccaaggatgcacgagagtgcatccaggagtgtgtctccgagttcatatccttcattagcagtgaggccatcgaacgtagcgtcgcggagaatcgcaagacagtcaacggggacgacctgctggtggcgttcagcaatctgggattcgacaattacgtggaaccactgtccatttacctgcaaaagtaccgagaggtcagtgagattacgctatgcacagcagttaataaccaagtaacccattgcagtcgaacaaatcggatcgtaatctctttctggacgccagttatccgcacaacgaagatgggtcctccgcaaacgatgcggggaaacagtaacccctttcttacttaccctgttagttaa

SEQ ID NO: 42603 - protein, 183 aa, DROSOPHILA
MSNSEDSQQYLNDMLVKEEDEASGDDSDKQDGGIMLREQDRFLPICNIIKIMKVPVPQNGKIAKDARECIQECVSEFISFISSEAIERSVAENRKTVNGDDLLVAFSNLGFDNYVEPLSIYLQKYREVSEITLCTAVNNQVTHCSRTNRIVISFWTPVIRTTKMGPPQTMRGNSNPFLTYPVS

SEQ ID NO: 42604 - DNA, 3717 bp, DROSOPHILA
tcgtcacctagtgaccccactcgcctaccgtccggggatctacttcgctatctggagaacaaagtgctggagtttgaggagtcgcacttctgcggtatttgcatggagcgaaaaagggatgtggccttcctgtgcgggcacggcgcgtgctcccattgtgccgaaacgctccgcacatgccacatgtgtcgcaagacaatactcaagaagatcaacctgtactgaacggcggtaacggaaacgaaagaaaagcaaaggcggcaggatcagcagcaattcaaacagcaaccaaagtggcttgtatatatacatacacaaaacaaacacacactcacattgccgtgtcatgtgcaaatcgaaattattatttattgatcacaaacgaaatttacgagttcttttttaatcggttcatcatcggcatcgtcgcaacacgcaacaaattaatgtgcaccttctcgtgtctagttattagccccgtttaaccatgtctggtaacgataaatacataggaaactaactaaagcatacaaatatttaatagtcatttaaatgcaaatatacaaatataaaattatttaattgagtgaatttcaatcgatgtcggtggttagcctacagaaaataaagatactttatttctgaatatgctggggtgacttttaattgtattggtatttaaaaggtttagtttaaaattgaatatataataagtttagaaagattttaaaactgaaatgttgtaacggcaaagtgtgaacaagttattttctttcagtacgctgcataaattttaaatgttttgcatttttgtaagcattgacttggcaagctgtcggatcttaagctccgtttaaaagttaatgtaagcaaaagcggcaaagtacaacttataattgaaaatatacacaagtttattttttatttgagcgaaacaatcgatacctccagatttacacgctaatcgataacaacgtagccagaaaaaaagcaaacacgtcacaacactttggccgcagtccgacgcgaaactaaagtaaaggacaaaatggccaaacaagtggctgattaccagtgcagtaagctccagttgtaccaaaagctggcactggtcgtaatcctgggagcagtgcttttctcgctcccggcgttgtgcgccggccagggcaatcccagtttcaaatactcgcgggaagccaacgaaaacttcgatccgcagaaggctccacgggcggagcaccatcatcatcatgatcatgaccacgatcatggacaccaccaccacgggcacgatcatgatcatgaccacgaccacgggcatgatcatggacaccatcatcacgggcacgatcatgatcatgaccacgaccacggacaccatcatcacgggcacgatgaaaggcacaccaaggcaaagccggatttgggtaatcaacgaactaccactcttaaaatgcccgagttgacccaaatttcttatagatatgagcaccatttggttgcactcgatcggctcaactcttcttatcagtgccgctcccttcgtgctgctgtatatcattcccctagacaacagtgaggcgatgaagccgcgtctcaaagtgcttctggcctttgcttctggcggtttgttgggtgatgcctttctgcacttgattcctcatgccacgcatccacacagtcatggagaacacggccacgatcacggccatgatcaccatcatcatcatgatggcgaggagcatgaacatggtcacagccacgatatgagcattggtctgtgggtccttggaggaatcattgccttcctttcagtggagaaactggtacgcattctaaagggcggtcatggaggacacggccacagccatggagcaccaaagccaaaaccagtgcctgctaagaaaaagtcctctgacaaagaagacagcggagatggagacaaaccggcaaagccagccaagatcaagtccaagaaaccagaagcggagccagaaggcgaagtggagatttccggctacttgaatttggcggcggactttgctcacaacttcaccgatggcctggccatcggcgcctcctatttggcgggcaacagcattggcattgtgaccactatcactattctgctgcacgaagtgccccatgagattggtgactttgccattcttataaagtctggctgttccaggcgaaaggcaatgcttctgcagctcgtcacagcgctcggagctttggcgggcacagcgctagctcttctgggagctggaggcggggacggatcggccccatgggtcttgcccttcacagccggcggttttatttacatcgcaacagtgagtgtcctgccggagctgcttgaggagtctacgaaactgaaacagtcgctgaaggaaatctttgcgctgctaaccggcgtagccctaatgatcgttatcgccaagttcgagtaatatcaaaattgtggaaagttaacacaaaaaagatctaattgcatgtactgaaagtgtgccgcaaacaatttgaaagatttctgttcgttacctactcaaaacgatgagcaactacttaaatttcttatatttcaacagtcagtaaccgctattagttcccaatataaacaatgcggcgttatttaagattttttaagccttccaaatttgtgcttcacttcgaaatgaaatttttataaatagtcaaaattacactgtaaaaagaatcctcactggcgcttctctccattcagggttgtctttatctcgttgagacaatactcggcctgctctacggcatcgggattctggtgttgctttcccagtttccacgccagtcggcaagcgttctccgcctgcgacatcaggccctcgcgaagatacaccaaacccagatttgcctgcagaatgccttcctgggtggcatcctttagctccttagtcagctccatggcctccaaaagggtctcccttgcctcggcgtacttttccagctgtaattagtctaatgtgtttcaagtactttggaagaatagacgcacctacgtttacgtacgccacactgatgttatttaggatggttacagaggcgtcgttaacggcaccataaacatttatgagcgtgtcgaaggcctccttaaagaggtttttagcctccaggtattttccctgcttcatcagcagctgcccgaacctggaaaataaacataaggaaaagtattgaaaaaaggcttggttagcggcaatggaaacaccttcaataccaattctttgtcaagccatacagctccagtatgtccttgtcgtcgggcattttctccagtagcttagccaactgctgcaaggtccaagtgaacccttgaaagctcttttccagatccccttgcagctgagacatgtgtgctatcttggagctgatgtgaagtatctaaagatgaaagagatcttaactggttatggtgtctaagtgggtcacccaccttgggactctcttcggtgtgaccctcggcaaaaagccgtttcataacgtccgtgaatatcttctccgccttcttaaactgctcgcgttccatggccaaattggccatcagatcaaacacatatgtgatgccgtccttgctctgaatatcctgcgccattcgcagagccaggtgaagcatttgctcggccttgtcgtactgttccctctgaatgcacaggattgatcgtttgatggtcttgatca

SEQ ID NO: 42605 - DNA, 1662 bp, DROSOPHILA
cacaacactttggccgcagtccgacgcgaaactaaagtaaaggacaaaatggccaaacaagtggctgattaccagtgcagtaagctccagttgtaccaaaagctggcactggtcgtaatcctgggagcagtgcttttctcgctcccggcgttgtgcgccggccagggcaatcccagtttcaaatactcgcgggaagccaacgaaaacttcgatccgcagaaggctccacgggcggagcaccatcatcatcatgatcatgaccacgatcatggacaccaccaccacgggcacgatcatgatcatgaccacgaccacgggcatgatcatggacaccatcatcacgggcacgatcatgatcatgaccacgaccacggacaccatcatcacgggcacgatgaaaggcacaccaaggcaaagccggatttggatatgagcaccatttggttgcactcgatcggctcaactcttcttatcagtgccgctcccttcgtgctgctgtatatcattcccctagacaacagtgaggcgatgaagccgcgtctcaaagtgcttctggcctttgcttctggcggtttgttgggtgatgcctttctgcacttgattcctcatgccacgcatccacacagtcatggagaacacggccacgatcacggccatgatcaccatcatcatcatgatggcgaggagcatgaacatggtcacagccacgatatgagcattggtctgtgggtccttggaggaatcattgccttcctttcagtggagaaactggtacgcattctaaagggcggtcatggaggacacggccacagccatggagcaccaaagccaaaaccagtgcctgctaagaaaaagtcctctgacaaagaagacagcggagatggagacaaaccggcaaagccagccaagatcaagtccaagaaaccagaagcggagccagaaggcgaagtggagatttccggctacttgaatttggcggcggactttgctcacaacttcaccgatggcctggccatcggcgcctcctatttggcgggcaacagcattggcattgtgaccactatcactattctgctgcacgaagtgccccatgagattggtgactttgccattcttataaagtctggctgttccaggcgaaaggcaatgcttctgcagctcgtcacagcgctcggagctttggcgggcacagcgctagctcttctgggagctggaggcggggacggatcggccccatgggtcttgcccttcacagccggcggttttatttacatcgcaacagtgagtgtcctgccggagctgcttgaggagtctacgaaactgaaacagtcgctgaaggaaatctttgcgctgctaaccggcgtagccctaatgatcgttatcgccaagttcgagtaatatcaaaattgtggaaagttaacacaaaaaagatctaattgcatgtactgaaagtgtgccgcaaacaatttgaaagatttctgttcgttacctactcaaaacgatgagcaactacttaaatttcttatatttcaacagtcagtaaccgctattagttcccaatataaacaatgcggcgttatttaagattttttaagccttccaaatttgtgcttcacttcgaaatgaaatttttataaatagtcaaaattacactgtaaaaag

SEQ ID NO: 42606 - protein, 449 aa, DROSOPHILA
MAKQVADYQCSKLQLYQKLALVVILGAVLFSLPALCAGQGNPSFKYSREANENFDPQKAPRAEHHHHHDHDHDHGHHHHGHDHDHDHDHGHDHGHHHHGHDHDHDHDHGHHHHGHDERHTKAKPDLDMSTIWLHSIGSTLLISAAPFVLLYIIPLDNSEAMKPRLKVLLAFASGGLLGDAFLHLIPHATHPHSHGEHGHDHGHDHHHHHDGEEHEHGHSHDMSIGLWVLGGIIAFLSVEKLVRILKGGHGGHGHSHGAPKPKPVPAKKKSSDKEDSGDGDKPAKPAKIKSKKPEAEPEGEVEISGYLNLAADFAHNFTDGLAIGASYLAGNSIGIVTTITILLHEVPHEIGDFAILIKSGCSRRKAMLLQLVTALGALAGTALALLGAGGGDGSAPWVLPFTAGGFIYIATVSVLPELLEESTKLKQSLKEIFALLTGVALMIVIAKFE

SEQ ID NO: 42607 - DNA, 9030 bp, DROSOPHILA
aaaaaagagctctcagctgttgcactaaaaaccaaaacatacatcgaactgcacgacagctatcgaaagccattgagatgcactttctctatcgatagaaaatatcgttatttattatttatcatgtttacaaaattaaacaggaattaaatatgtatgtttataaaaatataaatgttaatatttaaattaaaattaatacattttaccctagagcttttataattttaatatcagtaacatcgaagtttgggtacaacctcatgttaataaaaataatttttaatatattctgtcaatcattgcttatattaaagtcaattgccatggccgaaccacgcccaccatctagtgcctttagcatgcactgctccgcccactttagcttctcatcctgctccttaatcttgtccagtggggtccagctcaaatcgtactccaacctgtagctgcctttgaatgtttggtcaacggagagactccattcctgaaagtgtacatccattaataatgcgattttagaattattttcaaacaaaacgtacttccggtgatagcatgctgaaatagttttgacccgatggcctttgataaagatgatagatgtgtccgggttttttggtgaaattgcaggccgcactgtgcagatctcggttgagagtggactccttaagtatctccatcgcttgggcctgaagcattttgatctatgaaagatttattagtttgtattataattgttaaagaggagtatagcttacctgctccattatgacccccagcttttggcaagttgtgtttttcaattgtttatcagcattctgaatttgttgggccaattcgatgatatcctcctcctggtgcatggacacacgcatggggtttatctgcaactggggattcctctcaaccagttgggctaaaaaatacaatatttatttgtttacctctcagtagttatatcatagaagcgtacccttttttacagctgtctgatacgtcaattcgtccatttcggccgctcttttcatcacacgctaccgaacatgaatacaaataagtaatcactccgcgattgacaactatgtaaatttatggactgccaaaaataaaataataacatgtgttctttatagctggtatatctcctccagtcatcgttttccctaggtgttatcgatcactatcgaatagatgtcatattgcacggccgtctctagatagaaagaagaagcacactaaattgtagttttatttaatagttctagcgaaatagtgaattttggccatttaactaaaaaattgtaatgtccaggcgaaattgaccataagtgcggtatctgtgtgttaaatagtgcggaaattagatcgcgtgcgagtgaactatgccctttttggcaaccagagcaacggtgtcactgcattttagcgaaaggaaacactaaatgcccattaaaaagcgcacgcgcgtataaaatgcaccattaaaggcttgagaactttaagtttttcattgcgaacagctggagctaagcgacagtatcacaaattgcattggtaagcccaaaaaaaaatccaaaccaagcccccaataatcgcttttcacatactcaattttgcataagtatatatttgtaaaatatatacacatacgtatatatatgtgtgcgatggcaaaacgggcgtgagtgtgagtgtgtgcttggactttcgtaaacaacacatgcgggtcgattccttgaatgacttcgctgcttgaccaagaagtcacaggcacttggcttttgtcagcgggacgatgagaaatccgtatcgaaattgaaatcggaggttcagacggtgcatatatacatatatccgtcttatcggcatgcgtcatgcgagcttctgggctgcacccacaccacaaaacctcggactgccagaaaccgaagcgctggcgatcgggaaacatatctggcatttgaatggcatttcctcccccgacaccccataaatgatgcgaagggttaacaaagaaatctcaagagttttaatacagaaatctctagaaaattttaattctgcttaagtattttgtgaagagtacaatttcttgcttagaattaagccactgcaatgttttaaaacatgctcatagagacccttccatgcttgagcctacaaagacttctgagatgaccccgatatgctcctctccttttgagtcatgcgctgacggggccgccatttagttgacccaattatcagccaggtcccatcaaacgccgtgccccgagtattgtcaaatgtcacatttatgctatcctccttgcaggctgaatcggattacacaaattgagccaaccaaacgccatgcgagcctccattccgcccggcattcgagtggtgcgcggacccaactggatctggtcgaatcaaggtaagaacgcattcaggcagccacgggccagcttgtttactttcacccacctccaaagaggcgaattaacttgccatccgctctctgtttatagatacgggtgtttttgttatatagttcagatcgaaatttgcgtacggtagagattaggcggtggggatgtcgccaacttaggcattcaatttcggtaaaacccatacttagtcatacgttctccgattaaaagggctttacaatgggattattacttctgtttaaactccaatatctgtccttaaaaaaaatcatgtttataatttattaagctgattttatccgcatattttggatttgatagcgtaataataataagcaatatcttaaataaacatttttatacctcttacgatcgatcaatatttgatcaaatttaatctactgatactttaatttttgttataatatgtatgtagaaaagacatgataaataatgaatatatggcataaagggaatcacttcgtggccaatacttactgtatacgccaaacgcaactcacttggcattggcacccgtagagggtccgttgagagtgtgcgagtgcggaggggtgtggggcaatgggacgggatgggacggagaggtgtacgtccgtgtccgctgctgctgctcggggcgttgttgaatgtaaagaggacgcgcccgctatttttagcaacactcactgcggcagcagtgaaattcttgcgcttaccaattgcttctgctttcgtcgcttcgttttatggttcatatacatacatatgtacatatatatggcggggatgtgtggctctcgatggtacgtacatatatagtacgccaccctacgtggcaggtaaatacatatgcacatacatacgtccgtaggcagctgcccgccaaacaataatattgcgtagtttttaattgaattaattgtctttcgctggaacaaattcgtaacgtattacaaacaattagatgatgaggcttatatcgtttcgaaagcttgataaaccgactgtattatatgtgccatgaaaagagattagaactcaaaacctcaaaaatgaaaggaatgtagaacactataattttcaattacattttgatagttgcaaatgaatattaccaagagagaacatttcttcagatacacttcaaaaacaatttgaatcattttgtggaagttaaaccaatcaccaaagcctaatttgataataaacgcagtaatgtttaagcctattgaaggatcctattaaagcagctgcacacgtttaggattaggtcatggtatgtgttcccccctccccaagtcgccctattccagcctgtgcagcgaatgcatatgcacatgtcaggcgctagggcgcgtgccattttgtctccaacctttttttgagtgtttatttttagttacacgggtggggatcgcgagcagttacacagctccagccggcctgatatttggggacgatgtggagagtttatttttggaccttggtattcctccgactggggtgtgttgaaaatagacataaacaaattttcagatgggagcccagccatcggtgctcccattcctccccaggccaacatcaaatgtcaccctctagagaacgattccacatccacacccgtgatacggggtaattatagagcagctgcacgcccgagtccgagtgcataacaaaaatccgcttggagcccgagcccgagtcaatgattatgggtatttatagtcacggcgcgttgtttatgagggggaagtgtgcgctctgcatatgtctgatatccaccggatgtggatgtggggatggtgatgccgatgtacacacaatgcagccctaggagcatccttgtggcagctctatagctctatagcttctccaactcacatcacgtcactctcgactttgtttcattgcttacgcaacagacgacggagaaggtcacgttggaaccgtttgcgaaatcggacgttgcggatcgacacattcgccagaaaacactgtcgtggtcaactgggattccggacaccggaccaactaccgtgtgggctaccaaaaccagtacgacttgataattgtagataatgctcaagttggtaagtgacgatatttaagaaatctattcaattagttaattttaattttccaaattacaattatttatagttcattgtttataaggtcttatattcgaattcttttttcgcaggagttcgtcactcaaatgttgtctgcgatggctgttccaaggcgggtatcgctggcatagtattcaagtgcgcccagtgtcccaactatcacctatgcgcctattgctacgcagaggatctgcacgatattgagcacccgtttatccgctacacgactcccaactcgctgggcgtgagattgcccatgagaaaaggtgccaagcgcatccagctgcgaggcatctttgtgggttccaaagtagtgcgcggtcctgactgggagtggaacgaacaggacggcggagaaggcaggacgggtcgggtaatggaaatccgaggctgggacaacgaatcgtgtcgcagcgtggccaacgtagcgtgggtaaccggatcgacgaacgtctaccgtctaggtcacaagggaaacgttgacctcaagtacattactgccacgtgcggtggtcactactataaggaccacatgcctgttctaggtcagacagaggagttgcagccggtggcgcccatggtgaagccaagcttttccgtgggcgaccgcgtcaaggtttgcctagaggttgacgccctaatgaaattgcagcagggccatggcggatggaatccgcgcatggtcgagcatttgtccaaactgggcacagtacaccgcatcacggacaagggggatatacggtgagaatatataatttggttgattttatttggatttctaacacagtcgaaacccaaacagtgttcagtatgaaaactgtcccaatcgatggacctttcatcccgccgcactcgttaaggttgtctcttttcgtgtcggtgacctggtcaccatcatcaacgatgccaacaaagtgcagcagctgcagaagggtcacggcgaatggatagaaatcatgcgacacgtgagtattcagattatgttaaatcttttttgagagtattctttaaaaaaaatgtttttcaggcccttggaaaaatttgcaaggtagtgaaggtgtactcggacggtgacctccgcatccagcagttggacgacggcttcgagtggaccctgaatccgaaatgtgtcaaactagagcgttctcctttggcaacagcagctgagcgctctaacagtatgatggacctaagccaccgacgcgctgaccatgtaatgacaccgctctctggcctctccggtagttcggttgccgacaagctggtgcgcgaggctgcccagggccatttggatttcgtgcggcagtacctggacgtgaatcccagccaggtggatgtgatgagtggcggcaaggcttgtattcaggtggcctctcatcagggctacgtcgatcttgtcagctacctcatctccaagggtgccaacgtgaatgcggtcgacaaggaaggtgattcagctctgcactacgcagccttcggcaatcagccggccaccatgagagtgctgctgcagcacggtgctgaggtgaacttcctaaactcgagccactgctctgcactgcacatctgcgcgcacaagaaaacgccgcactgtgtgcgtgagttgctgcagcacaatgccaacgtaaacattcaggattcgtacggggatacggcgcttcacgacgcaatcggcaaagagaatacggaagttgtggagttgctttgtaatgctccgaatctggactttacggttaagaataatcgcggctttaacgtgctacaccatgcagcgcttaaaggaaacgtggtagctgctcgccgtatcctgttgctctcccgccagctggtcaatgtgcgcaaagacgatggctttgcggctcttcatttggcagcccttaacggtcatgcccaggttgtggaaacgctggtcactgagggccaagcggagttagatatacgcaataatcgccaacagacgccgttcctactggccgtctcccagggccatgccggggtaatcgagcgactcgttcgcctctcctgcgacgtgaatgccaaggatgaggatggcgacaatgcgatgcacttgtgcgtcattaagaagtccaatctgcagtcggccgcggagcctcagccagaggaggctcctgagattcacaagttttacctgagtctagtacactcgagcattcgtcctgaggatcgtttgatgtacagtatattgatctatctttcgagggccggctgccgagtggagctgaacaacgccaatgcaagcatttttgagtggataacggaccgccacatcaggcaactgatttttgggcagcagggcgaagctgaatcgctgcctaggaatcttcaagctttggaagtgtccgcaggatcagccgacggtgaggagagctctgcgtctgctggagctgaatccaatggagccggacctggaagcgttgcagcacccccaccaccgcagcgccagacatttgaactaatgccaaagccaaacgatatcccagccattggagttggagcatctccatccacgccctccgcctcgccgggcgtaaagaaactgaactccgacgcaacaccgcaaaacgtctctccacaggtggcaccgcgcaagaaggcgcccaagcctccggttaccactagctcgagcagtaccgcgttggaagccggagcggcgggacccagtaccagtccggtgatcgtccccggtccccatgagtgcattgtgtgcaatgagatcctgccgatggtgcgctttgagccgtgtcagcatcagatcgcctgcgaggagtgcggcatccgaatgaaaaagtgtctccgctgtgccgtggcgatcgagcggcgattgacggtcagcggccgagtggtggccctgcccacgtccacgtcgtcacctagtgaccccactcgcctaccgtccggggatctacttcgctatctggagaacaaagtgctggagtttgaggagtcgcacttctgcggtatttgcatggagcgaaaaagggatgtggccttcctgtgcgggcacggcgcgtgctcccattgtgccgaaacgctccgcacatgccacatgtgtcgcaagacaatactcaagaagatcaacctgtactgaacggcggtaacggaaacgaaagaaaagcaaaggcggcaggatcagcagcaattcaaacagcaaccaaagtggcttgtatatatacatacacaaaacaaacacacactcacattgccgtgtcatgtgcaaatcgaaattattatttattgatcacaaacgaaatttacgagttcttttttaatcggttcatcatcggcatcgtcgcaacacgcaacaaattaatgtgcaccttctcgtgtctagttattagccccgtttaaccatgtctggtaacgataaatacataggaaactaactaaagcatacaaatatttaatagtcatttaaatgcaaatatacaaatataaaattatttaattgagtgaatttcaatcgatgtcggtggttagcctacagaaaataaagatactttatttctgaatatgctggggtgacttttaattgtattggtatttaaaaggtttagtttaaaattgaatatataataagtttagaaagattttaaaactgaaatgttgtaacggcaaagtgtgaacaagttattttctttcagtacgctgcataaattttaaatgttttgcatttttgtaagcattgacttggcaagctgtcggatcttaagctccgtttaaaagttaatgtaagcaaaagcggcaaagtacaacttataattgaaaatatacacaagtttattttttatttgagcgaaacaatcgatacctccagatttacacgctaatcgataacaacgtagccagaaaaaaagcaaacacgtcacaacactttggccgcagtccgacgcgaaactaaagtaaaggacaaaatggccaaacaagtggctgattaccagtgcagtaagctccagttgtaccaaaagctggcactggtcgtaatcctgggagcagtgcttttctcgctcccggcgttgtgcgccggccagggcaatcccagtttcaaatactcgcgggaagccaacgaaaacttcgatccgcagaaggctccacgggcggagcaccatcatcatcatgatcatgaccacgatcatggacaccaccaccacgggcacgatcatgatcatgaccacgaccacgggcatgatcatggacaccatcatcacgggcacgatcatgatcatgaccacgaccacggacaccatcatcacgggcacgatgaaaggcacaccaaggcaaagccggatttgggtaatcaacgaactaccactcttaaaatgcccgagttgacccaaatttcttatagatatgagcaccatttggttgcactcgatcggctcaactcttcttatcagtgccgctcccttcgtgctgctgtatatcattcccctagacaacag

SEQ ID NO: 42608 - DNA, 4020 bp, DROSOPHILA
tcaattcgtccatttcggccgctcttttcatcacacgctaccgaacatgaatacaaataactggtatatctcctccagtcatcgttttccctaggtgttatcgatcactatcgaatagatgtcatattgcacggccgtctctagatagaaagaagaagcacactaaattgtagttttatttaatagttctagcgaaatagtgaattttggccatttaactaaaaaattgtaatgtccaggcgaaattgaccataagtgcggtatctgtgtgttaaatagtgcggaaattagatcgcgtgcgagtgaactatgccctttttggcaaccagagcaacggtgtcactgcattttagcgaaaggaaacactaaatgcccattaaaaagcgcacgcgcgtataaaatgcaccattaaaggcttgagaactttaagtttttcattgcgaacagctggagctaagcgacagtatcacaaattgcattggctgaatcggattacacaaattgagccaaccaaacgccatgcgagcctccattccgcccggcattcgagtggtgcgcggacccaactggatctggtcgaatcaagacgacggagaaggtcacgttggaaccgtttgcgaaatcggacgttgcggatcgacacattcgccagaaaacactgtcgtggtcaactgggattccggacaccggaccaactaccgtgtgggctaccaaaaccagtacgacttgataattgtagataatgctcaagttggagttcgtcactcaaatgttgtctgcgatggctgttccaaggcgggtatcgctggcatagtattcaagtgcgcccagtgtcccaactatcacctatgcgcctattgctacgcagaggatctgcacgatattgagcacccgtttatccgctacacgactcccaactcgctgggcgtgagattgcccatgagaaaaggtgccaagcgcatccagctgcgaggcatctttgtgggttccaaagtagtgcgcggtcctgactgggagtggaacgaacaggacggcggagaaggcaggacgggtcgggtaatggaaatccgaggctgggacaacgaatcgtgtcgcagcgtggccaacgtagcgtgggtaaccggatcgacgaacgtctaccgtctaggtcacaagggaaacgttgacctcaagtacattactgccacgtgcggtggtcactactataaggaccacatgcctgttctaggtcagacagaggagttgcagccggtggcgcccatggtgaagccaagcttttccgtgggcgaccgcgtcaaggtttgcctagaggttgacgccctaatgaaattgcagcagggccatggcggatggaatccgcgcatggtcgagcatttgtccaaactgggcacagtacaccgcatcacggacaagggggatatacgtgttcagtatgaaaactgtcccaatcgatggacctttcatcccgccgcactcgttaaggttgtctcttttcgtgtcggtgacctggtcaccatcatcaacgatgccaacaaagtgcagcagctgcagaagggtcacggcgaatggatagaaatcatgcgacacgcccttggaaaaatttgcaaggtagtgaaggtgtactcggacggtgacctccgcatccagcagttggacgacggcttcgagtggaccctgaatccgaaatgtgtcaaactagagcgttctcctttggcaacagcagctgagcgctctaacagtatgatggacctaagccaccgacgcgctgaccatgtaatgacaccgctctctggcctctccggtagttcggttgccgacaagctggtgcgcgaggctgcccagggccatttggatttcgtgcggcagtacctggacgtgaatcccagccaggtggatgtgatgagtggcggcaaggcttgtattcaggtggcctctcatcagggctacgtcgatcttgtcagctacctcatctccaagggtgccaacgtgaatgcggtcgacaaggaaggtgattcagctctgcactacgcagccttcggcaatcagccggccaccatgagagtgctgctgcagcacggtgctgaggtgaacttcctaaactcgagccactgctctgcactgcacatctgcgcgcacaagaaaacgccgcactgtgtgcgtgagttgctgcagcacaatgccaacgtaaacattcaggattcgtacggggatacggcgcttcacgacgcaatcggcaaagagaatacggaagttgtggagttgctttgtaatgctccgaatctggactttacggttaagaataatcgcggctttaacgtgctacaccatgcagcgcttaaaggaaacgtggtagctgctcgccgtatcctgttgctctcccgccagctggtcaatgtgcgcaaagacgatggctttgcggctcttcatttggcagcccttaacggtcatgcccaggttgtggaaacgctggtcactgagggccaagcggagttagatatacgcaataatcgccaacagacgccgttcctactggccgtctcccagggccatgccggggtaatcgagcgactcgttcgcctctcctgcgacgtgaatgccaaggatgaggatggcgacaatgcgatgcacttgtgcgtcattaagaagtccaatctgcagtcggccgcggagcctcagccagaggaggctcctgagattcacaagttttacctgagtctagtacactcgagcattcgtcctgaggatcgtttgatgtacagtatattgatctatctttcgagggccggctgccgagtggagctgaacaacgccaatgcaagcatttttgagtggataacggaccgccacatcaggcaactgatttttgggcagcagggcgaagctgaatcgctgcctaggaatcttcaagctttggaagtgtccgcaggatcagccgacggtgaggagagctctgcgtctgctggagctgaatccaatggagccggacctggaagcgttgcagcacccccaccaccgcagcgccagacatttgaactaatgccaaagccaaacgatatcccagccattggagttggagcatctccatccacgccctccgcctcgccgggcgtaaagaaactgaactccgacgcaacaccgcaaaacgtctctccacaggtggcaccgcgcaagaaggcgcccaagcctccggttaccactagctcgagcagtaccgcgttggaagccggagcggcgggacccagtaccagtccggtgatcgtccccggtccccatgagtgcattgtgtgcaatgagatcctgccgatggtgcgctttgagccgtgtcagcatcagatcgcctgcgaggagtgcggcatccgaatgaaaaagtgtctccgctgtgccgtggcgatcgagcggcgattgacggtcagcggccgagtggtggccctgcccacgtccacgtcgtcacctagtgaccccactcgcctaccgtccggggatctacttcgctatctggagaacaaagtgctggagtttgaggagtcgcacttctgcggtatttgcatggagcgaaaaagggatgtggccttcctgtgcgggcacggcgcgtgctcccattgtgccgaaacgctccgcacatgccacatgtgtcgcaagacaatactcaagaagatcaacctgtactgaacggcggtaacggaaacgaaagaaaagcaaaggcggcaggatcagcagcaattcaaacagcaaccaaagtggcttgtatatatacatacacaaaacaaacacacactcacattgccgtgtcatgtgcaaatcgaaattattatttattgatcacaaacgaaatttacgagttcttttttaatcggttcatcatcggcatcgtcgcaacacgcaacaaattaatgtgcaccttctcgtgtctagttattagccccgtttaaccatgtctggtaacgataaatacataggaaactaactaaagcatacaaatatttaatagtcatttaaatgcaaatatacaaatataaaatt

SEQ ID NO: 42609 - protein, 1049 aa, DROSOPHILA
MRASIPPGIRVVRGPNWIWSNQDDGEGHVGTVCEIGRCGSTHSPENTVVVNWDSGHRTNYRVGYQNQYDLIIVDNAQVGVRHSNVVCDGCSKAGIAGIVFKCAQCPNYHLCAYCYAEDLHDIEHPFIRYTTPNSLGVRLPMRKGAKRIQLRGIFVGSKVVRGPDWEWNEQDGGEGRTGRVMEIRGWDNESCRSVANVAWVTGSTNVYRLGHKGNVDLKYITATCGGHYYKDHMPVLGQTEELQPVAPMVKPSFSVGDRVKVCLEVDALMKLQQGHGGWNPRMVEHLSKLGTVHRITDKGDIRVQYENCPNRWTFHPAALVKVVSFRVGDLVTIINDANKVQQLQKGHGEWIEIMRHALGKICKVVKVYSDGDLRIQQLDDGFEWTLNPKCVKLERSPLATAAERSNSMMDLSHRRADHVMTPLSGLSGSSVADKLVREAAQGHLDFVRQYLDVNPSQVDVMSGGKACIQVASHQGYVDLVSYLISKGANVNAVDKEGDSALHYAAFGNQPATMRVLLQHGAEVNFLNSSHCSALHICAHKKTPHCVRELLQHNANVNIQDSYGDTALHDAIGKENTEVVELLCNAPNLDFTVKNNRGFNVLHHAALKGNVVAARRILLLSRQLVNVRKDDGFAALHLAALNGHAQVVETLVTEGQAELDIRNNRQQTPFLLAVSQGHAGVIERLVRLSCDVNAKDEDGDNAMHLCVIKKSNLQSAAEPQPEEAPEIHKFYLSLVHSSIRPEDRLMYSILIYLSRAGCRVELNNANASIFEWITDRHIRQLIFGQQGEAESLPRNLQALEVSAGSADGEESSASAGAESNGAGPGSVAAPPPPQRQTFELMPKPNDIPAIGVGASPSTPSASPGVKKLNSDATPQNVSPQVAPRKKAPKPPVTTSSSSTALEAGAAGPSTSPVIVPGPHECIVCNEILPMVRFEPCQHQIACEECGIRMKKCLRCAVAIERRLTVSGRVVALPTSTSSPSDPTRLPSGDLLRYLENKVLEFEESHFCGICMERKRDVAFLCGHGACSHCAETLRTCHMCRKTILKKINLY

SEQ ID NO: 42610 - DNA, 5258 bp, DROSOPHILA
actctcttcggtgtgaccctcggcaaaaagccgtttcataacgtccgtgaatatcttctccgccttcttaaactgctcgcgttccatggccaaattggccatcagatcaaacacatatgtgatgccgtccttgctctgaatatcctgcgccattcgcagagccaggtgaagcatttgctcggccttgtcgtactgttccctctgaatgcacaggattgatcgtttgatggtcttgatcagtttttcctccggagtttcctctttttcgtcggcgccaccaaacagattcagagtgaaagcagcggaaaatgcccaaaacattccaccggaagagccagaagcgggcggagctgcccaggacacctcgtagcccgcagcattggagcacagcggtcgacatccgaattctgaccgttggtgataacggcttctcttcagcggcgcaagatgacagtaatctctgggattcacgacaacgcggaacctgcccataacttgcgtaaacttgcaaatatttctcactaacatgtttagggctttattaattatttaactaaaacctataatgttgcaggtatggtattaaaaattatgaaatagcacgtatgtagtgttgcaaagcgcggtaaagacgttttaaaagtacatttcgtaacgcttgattaagaacatagaagacttttaaataatttctactctatcatactttcgcaaatatatttatgtttcgttaagatttcgtaaacaaaggtttttaaattttttagagatgacactgtcaaacaaaactttatcggcaactttggtacctaacatttcgttcataagttaaatctgcgaacaaaaataaattgataagtagagttattaacaatctcgaataaaaaacatttaagtacatttgataaagtttttcgtaataaggtacttccttcccccatcgcatacgatactatcgatagccgtcagcggggcgatagaccgagagaaagcatccctgtatattgatggcggattgacgctctttcgcctagtaaaattatttttcttatcaagaaaaggtgcagaatataacgaggagtgaattcgcaaagcagtgcatgaaatagctgtgggtccgccggctgtacctacgttttatttcagatctttccagcgtcgcagcgagtttccagcgattttcggacagccatgagacgtcgcagcgagcgaaaaaagtcgtcgtcgcccgctccggtgccggtggcagttgcacggagaagtcgccgctcccgcaaggtgtcggagaacgagaagaccgaggtcgagactccggtcgtggcccaaaataatgaggccgaatgccccaaagtaccgccagcctctcaagaaatcaatgaggcgcgggcatccagtgaagaacgtgccggatctggagcatcgccagtgcgcaggagtcgcggcagccggacgacgcctagaaagcgcacggagtccaagggcggcgacaagaaggtggacaccatacccgaggaggagccggagaatggaaaggatgttgaaaaggacgctgtcgaggaggaaaagactgtagcgccacccgcggctaatgagagcgagtccgaggaccgtgccaagacggaggatcagcaggctcaagacgatgaatcctgtgctgaacccgctgtagtcaaggatgatgatgttgagaaagaggacttaaaaccgcagcaggaggtccccacttccactgatgatgacaccaagcagagcgagccagaacaagaggtaaaggttccttctccttccagcaaggatgaggaacatctaaaaacgactagtgatgtattagacattcagacagaagaggtcgatgaaagggacgaagaagcctccgctcctgcggagcgcagagaaaccaagaagaggcacaaggagcagataaaggaacagcaacccgcagaggaggaggaacacaaggaaaaccacaagcagatagacgaaaacccagaacaaattcacgatgaaccagcagatctttcgaacgacaagcacgatccatgtctaaacagcagcgcaaccaacacaaccggtgctccagttctgcagcaacaacggtcggtgcggaagcgaaagtggctgactaacaaaaagtcttcggatcgtaccccgcccgtgcttgccatttcgacggattccctgaagaacattatagccgatgtggtgcagccagtgcccctaagcgatgtgcaactggaatcgtcctcagaggaggaaggcctggtcaccagcgatcgcgattcagagcgatctgcttcaccggcgcccccatctgaagcaagcaaagaccgcgataacaagggcaataccgccaacacctgcgacaccaccgcagaggcgtcggcagataatgaaggagcaggagccgctcctccagcagcagcagacacggtttcagcccaggtcagcctgagcaaagccacagtttccacggcagcaccacacatagtccgtgaccctagtcctgctcgaaaccgcgccagccacgtgctctatatcaccaatttggtacgccccttcacagtgctgcagctgaaaggcctgctggcgcggacgggaaagatcgttgaggaagatggtttctggatagatcggatcaagtctaagtgctatgttgcctattccactgaagagtaagtattgtagttgcgcaaatagaacctaatctccagggagtcagtgaaatatgcctataaaaaactcacacttgcaattattttgcttttcaacctttaagcgaggccatcgaaacccgacatgccctgcacggagttcgctggccagtgtcaaatcccaaatgtttgaatgtagattttggcagtcgcactgatatggatcgggcaatactttcaacgaaggacgaggctccgaggtacgggcaggaaaacaccagagataaccagcagtcgggcaacgcttggtcccggttggaaccgtctgacaaaaaagtaatggattattatcacagcatagaaatgcggagctaacttgtctttttccttcagcctgcgcgacctgtacgcgaatgggatgttggcaaaaaggaaccaagcgaccacgacaaacacagcaacgacaggcgtcgggacagcaaggatcgactggactcgaggtctagggatgcggagcgagccggacaggaacgaaagcgttctagggacagagaggggcgaggacgcgatcgggagcgggagcgacttgatcgcaatgcacatgcaaggagccgcagtggatcgccaggtaaagcccgtgggatacattttcctgtcatgagaaattcaaaaacaccccgtttaaatagcgtccaaaactaagaaggagaatgaaccgcctatcagactactagatgatctatttcgaaaaaccaagggaacaccttgcatatactggctgccacttacgccggaagcggtaagttgctgagataaatagttccaatcaacgagaatcacttctagaccaagtccgcctgaacaataaaatttcttccggctttcagatcgcagaaaaggaggcattccgtcagaaacgcattgaggagcacaagctgcgtattaaggaacgggaggagcgccagaaagagcgggagaaggatcgtgaccgccagcgcgagacgcgtcgcaatcgttccaacgaacggcgacgatctcgcagtcgcgagcgggagcgaagacgttactaggcggaggcttgagattgagcaaataaatgttgatatctcaaaaactaaatcaacatataaaaaaaaacttcaagaaacagcaactaaaacttcagcagggtctcatcaccacccgaataatttcaattcttttctttcgagcgttttgcgttcccaattaggccgacgtttgtaatattcaacttgaactgaaccgacttcaaattgaatactttcgccaacgtctcatccacattctgattttgagatttcaaactctcttttcttcgttatttttctcattgttgttgttccatatatatatagcatatatatttccatatatatatatataacctgatttgatttctttcctcaaatgtagcattttacagcgcctaacgtcacctcaccccaaaacgaaaccacagcaaccagaaatgcgccggcatcagatcagcatcaacgccatggaaacttaccatcggactcttgaaactactgcagcaagttaccatgcttatatctattcaataaacaaacataaaataattgattaaaatattgtaaaatcaaatatttcttaaaattttaatgaacttagaaatacaatttaacatcagtcggcaagcttgtgacaatgccaaaacccaaaaatgtgttttaaatgtctgagaaatatgcttatcgcacgacttattcgaacagaaaaagaaaagaatgtaattcctcaaaattatagaaaatgtttttgattcgtaagaatcatggtatttagagcatattattataattttaatactctttaatttatatataaggtcagatttataaagtatgaactttttgccatttatttacttttccttatcaatttttagtaaaaacactgcttttattaataatcgcgagtctaatttattgattaaacttaaaaaagaataaatgaagttgtccgttaaagtaccagaatacccccaacaataagttcgttttaatcgatagtccatgttaataagctatcggagccgcttaatgatttatgtcaatagtgctatcgatgagttttaatttgtattaacattaatttagtgaaaaaatgtggtccgacacaatattaattgtttttatatcggtttgcaccgccttcctgggcgaaggtaagtaaaacgccagttaatttagttaaccctacatatttgtttgcctaggtcttacatgggtgatggtttaccggacggagaagtaccaaaagctaaagaccgaggtggaaaagcagagcaaaaagcgtaagtcggtcaaagggtgctatgaatggtcaggagctaacccgcattctgttacagtggagcgccgcaaggaaatccatggggactccctggacaaagcggtaaagaagaagatcgagcgcgacgaggaaaaactgaaaaacaacaaccgcgatctctcgcttgtcaagatgaagaccatgttcgccacgggattcgccttcaccgccctgttgagtatgttcaacagcatcttcgacggccgtgtggttgcccagctgcccttcaca

SEQ ID NO: 42611 - DNA, 2863 bp, DROSOPHILA
tatattgatggcggattgacgctctttcgcctagtaaaattatttttcttatcaagaaaagatctttccagcgtcgcagcgagtttccagcgattttcggacagccatgagacgtcgcagcgagcgaaaaaagtcgtcgtcgcccgctccggtgccggtggcagttgcacggagaagtcgccgctcccgcaaggtgtcggagaacgagaagaccgaggtcgagactccggtcgtggcccaaaataatgaggccgaatgccccaaagtaccgccagcctctcaagaaatcaatgaggcgcgggcatccagtgaagaacgtgccggatctggagcatcgccagtgcgcaggagtcgcggcagccggacgacgcctagaaagcgcacggagtccaagggcggcgacaagaaggtggacaccatacccgaggaggagccggagaatggaaaggatgttgaaaaggacgctgtcgaggaggaaaagactgtagcgccacccgcggctaatgagagcgagtccgaggaccgtgccaagacggaggatcagcaggctcaagacgatgaatcctgtgctgaacccgctgtagtcaaggatgatgatgttgagaaagaggacttaaaaccgcagcaggaggtccccacttccactgatgatgacaccaagcagagcgagccagaacaagaggtaaaggttccttctccttccagcaaggatgaggaacatctaaaaacgactagtgatgtattagacattcagacagaagaggtcgatgaaagggacgaagaagcctccgctcctgcggagcgcagagaaaccaagaagaggcacaaggagcagataaaggaacagcaacccgcagaggaggaggaacacaaggaaaaccacaagcagatagacgaaaacccagaacaaattcacgatgaaccagcagatctttcgaacgacaagcacgatccatgtctaaacagcagcgcaaccaacacaaccggtgctccagttctgcagcaacaacggtcggtgcggaagcgaaagtggctgactaacaaaaagtcttcggatcgtaccccgcccgtgcttgccatttcgacggattccctgaagaacattatagccgatgtggtgcagccagtgcccctaagcgatgtgcaactggaatcgtcctcagaggaggaaggcctggtcaccagcgatcgcgattcagagcgatctgcttcaccggcgcccccatctgaagcaagcaaagaccgcgataacaagggcaataccgccaacacctgcgacaccaccgcagaggcgtcggcagataatgaaggagcaggagccgctcctccagcagcagcagacacggtttcagcccaggtcagcctgagcaaagccacagtttccacggcagcaccacacatagtccgtgaccctagtcctgctcgaaaccgcgccagccacgtgctctatatcaccaatttggtacgccccttcacagtgctgcagctgaaaggcctgctggcgcggacgggaaagatcgttgaggaagatggtttctggatagatcggatcaagtctaagtgctatgttgcctattccactgaagacgaggccatcgaaacccgacatgccctgcacggagttcgctggccagtgtcaaatcccaaatgtttgaatgtagattttggcagtcgcactgatatggatcgggcaatactttcaacgaaggacgaggctccgaggtacgggcaggaaaacaccagagataaccagcagtcgggcaacgcttggtcccggttggaaccgtctgacaaaaaacctgcgcgacctgtacgcgaatgggatgttggcaaaaaggaaccaagcgaccacgacaaacacagcaacgacaggcgtcgggacagcaaggatcgactggactcgaggtctagggatgcggagcgagccggacaggaacgaaagcgttctagggacagagaggggcgaggacgcgatcgggagcgggagcgacttgatcgcaatgcacatgcaaggagccgcagtggatcgccagcgtccaaaactaagaaggagaatgaaccgcctatcagactactagatgatctatttcgaaaaaccaagggaacaccttgcatatactggctgccacttacgccggaagcgatcgcagaaaaggaggcattccgtcagaaacgcattgaggagcacaagctgcgtattaaggaacgggaggagcgccagaaagagcgggagaaggatcgtgaccgccagcgcgagacgcgtcgcaatcgttccaacgaacggcgacgatctcgcagtcgcgagcgggagcgaagacgttactaggcggaggcttgagattgagcaaataaatgttgatatctcaaaaactaaatcaacatataaaaaaaaacttcaagaaacagcaactaaaacttcagcagggtctcatcaccacccgaataatttcaattcttttctttcgagcgttttgcgttcccaattaggccgacgtttgtaatattcaacttgaactgaaccgacttcaaattgaatactttcgccaacgtctcatccacattctgattttgagatttcaaactctcttttcttcgttatttttctcattgttgttgttccatatatatatagcatatatatttccatatatatatatataacctgatttgatttctttcctcaaatgtagcattttacagcgcctaacgtcacctcaccccaaaacgaaaccacagcaaccagaaatgcgccggcatcagatcagcatcaacgccatggaaacttaccatcggactcttgaaactactgcagcaagttaccatgcttatatctattcaataaacaaacataaaataattgatt

SEQ ID NO: 42612 - protein, 739 aa, DROSOPHILA
MRRRSERKKSSSPAPVPVAVARRSRRSRKVSENEKTEVETPVVAQNNEAECPKVPPASQEINEARASSEERAGSGASPVRRSRGSRTTPRKRTESKGGDKKVDTIPEEEPENGKDVEKDAVEEEKTVAPPAANESESEDRAKTEDQQAQDDESCAEPAVVKDDDVEKEDLKPQQEVPTSTDDDTKQSEPEQEVKVPSPSSKDEEHLKTTSDVLDIQTEEVDERDEEASAPAERRETKKRHKEQIKEQQPAEEEEHKENHKQIDENPEQIHDEPADLSNDKHDPCLNSSATNTTGAPVLQQQRSVRKRKWLTNKKSSDRTPPVLAISTDSLKNIIADVVQPVPLSDVQLESSSEEEGLVTSDRDSERSASPAPPSEASKDRDNKGNTANTCDTTAEASADNEGAGAAPPAAADTVSAQVSLSKATVSTAAPHIVRDPSPARNRASHVLYITNLVRPFTVLQLKGLLARTGKIVEEDGFWIDRIKSKCYVAYSTEDEAIETRHALHGVRWPVSNPKCLNVDFGSRTDMDRAILSTKDEAPRYGQENTRDNQQSGNAWSRLEPSDKKPARPVREWDVGKKEPSDHDKHSNDRRRDSKDRLDSRSRDAERAGQERKRSRDREGRGRDRERERLDRNAHARSRSGSPASKTKKENEPPIRLLDDLFRKTKGTPCIYWLPLTPEAIAEKEAFRQKRIEEHKLRIKEREERQKEREKDRDRQRETRRNRSNERRRSRSRERERRRY

SEQ ID NO: 42613 - DNA, 2741 bp, DROSOPHILA
ctaaatcaacatataaaaaaaaacttcaagaaacagcaactaaaacttcagcagggtctcatcaccacccgaataatttcaattcttttctttcgagcgttttgcgttcccaattaggccgacgtttgtaatattcaacttgaactgaaccgacttcaaattgaatactttcgccaacgtctcatccacattctgattttgagatttcaaactctcttttcttcgttatttttctcattgttgttgttccatatatatatagcatatatatttccatatatatatatataacctgatttgatttctttcctcaaatgtagcattttacagcgcctaacgtcacctcaccccaaaacgaaaccacagcaaccagaaatgcgccggcatcagatcagcatcaacgccatggaaacttaccatcggactcttgaaactactgcagcaagttaccatgcttatatctattcaataaacaaacataaaataattgattaaaatattgtaaaatcaaatatttcttaaaattttaatgaacttagaaatacaatttaacatcagtcggcaagcttgtgacaatgccaaaacccaaaaatgtgttttaaatgtctgagaaatatgcttatcgcacgacttattcgaacagaaaaagaaaagaatgtaattcctcaaaattatagaaaatgtttttgattcgtaagaatcatggtatttagagcatattattataattttaatactctttaatttatatataaggtcagatttataaagtatgaactttttgccatttatttacttttccttatcaatttttagtaaaaacactgcttttattaataatcgcgagtctaatttattgattaaacttaaaaaagaataaatgaagttgtccgttaaagtaccagaatacccccaacaataagttcgttttaatcgatagtccatgttaataagctatcggagccgcttaatgatttatgtcaatagtgctatcgatgagttttaatttgtattaacattaatttagtgaaaaaatgtggtccgacacaatattaattgtttttatatcggtttgcaccgccttcctgggcgaaggtaagtaaaacgccagttaatttagttaaccctacatatttgtttgcctaggtcttacatgggtgatggtttaccggacggagaagtaccaaaagctaaagaccgaggtggaaaagcagagcaaaaagcgtaagtcggtcaaagggtgctatgaatggtcaggagctaacccgcattctgttacagtggagcgccgcaaggaaatccatggggactccctggacaaagcggtaaagaagaagatcgagcgcgacgaggaaaaactgaaaaacaacaaccgcgatctctcgcttgtcaagatgaagaccatgttcgccacgggattcgccttcaccgccctgttgagtatgttcaacagcatcttcgacggccgtgtggttgcccagctgcccttcacaccaatctcctggatccaggggttaagtcaccgaaatttgtccggtgacgactatacggactgctcctttatattcctctacatcctgtgcaccatgtccattcgtcagaacatccaaaagcttctgggttttgccccatcgcgcgccgcaagcaagcagggtgtaggtctgtttggtcctgctccaggccagttcaaatagttcaaattcattaattaaattgttgcatttagttttaatgcaccatcaacaattctagcttaatacattattcaactcgaacataggttggtcaacaatcagccggtcgaagctcagacgagagaggtcgatggttctgaactgaccatccatgatcagctcggatatggctcggcccacggccagagattgctgtactccgtgtccgctaaaaccggtggctaggtacagattgttgtagtacgggtgagctcctaaaatgccgttctcgtcgtatacgttatgatcatagcagcccgcccagctatccaccacttgggcttctccaagaacgggaattctattatacaaatggggtctgatgtgctgggcgaaatattgcggatcaatcatcgcgctattatactcttccgtcgaatcttgcacgcaaatatagttgccgcccaggccatctctgcgaataaagatgcccgacggatctattgtcatgggcatattcattccgggtgcactttgggcctgcgagttgatggcgtacatgtatcgcttgcgtgcgttgatgggcagcggaacccgaagtattcctggacccacgcctatccttgctaatcgcgcgatttgttcggaactagcaccggcgcttattacacacagggcgaacttgcaagtgcgtcgcgtaccatcgggcagttggatgaccgctttttccaagcccgtgtaggcaccctcgttggaaccaagatctgtgacaacagaaatgtccgtttgggatttgaactcgaagtcgaccacctggccactgataaaatgggcgccgtagccactggctgaccgtcggaaattgctcagaagtgccaacggattaaaccagccctctttttccagaccaagacagcccaaagcgatgcccttggtgtttagccaggggaatctggcagtcagtcgatctgcagtgagaagttcatttcgggcacccagttcgttttgtagctgagaggagcgcttcaggctttccgcgtgctcctcgccagcgagcatcagatggcc

SEQ ID NO: 42614 - DNA, 633 bp, DROSOPHILA
ttttaatttgtattaacattaatttagtgaaaaaatgtggtccgacacaatattaattgtttttatatcggtttgcaccgccttcctgggcgaaggtcttacatgggtgatggtttaccggacggagaagtaccaaaagctaaagaccgaggtggaaaagcagagcaaaaagctggagcgccgcaaggaaatccatggggactccctggacaaagcggtaaagaagaagatcgagcgcgacgaggaaaaactgaaaaacaacaaccgcgatctctcgcttgtcaagatgaagaccatgttcgccacgggattcgccttcaccgccctgttgagtatgttcaacagcatcttcgacggccgtgtggttgcccagctgcccttcacaccaatctcctggatccaggggttaagtcaccgaaatttgtccggtgacgactatacggactgctcctttatattcctctacatcctgtgcaccatgtccattcgtcagaacatccaaaagcttctgggttttgccccatcgcgcgccgcaagcaagcagggtgtaggtctgtttggtcctgctccaggccagttcaaatagttcaaattcattaattaaattgttgcatttagttttaatgcaccatc

SEQ ID NO: 42615 - protein, 183 aa, DROSOPHILA
MWSDTILIVFISVCTAFLGEGLTWVMVYRTEKYQKLKTEVEKQSKKLERRKEIHGDSLDKAVKKKIERDEEKLKNNNRDLSLVKMKTMFATGFAFTALLSMFNSIFDGRVVAQLPFTPISWIQGLSHRNLSGDDYTDCSFIFLYILCTMSIRQNIQKLLGFAPSRAASKQGVGLFGPAPGQFK

SEQ ID NO: 42616 - DNA, 5365 bp, DROSOPHILA
aattggatcggaagtgttaggaagtagtaaattttgagacgatgttggacggctgggcgtatttggaataaaccgagagatactaaattaaactatagcgctagcaaaaatagatgtctagataatggtacccccgcagagagttgcaatcgtattacacgtaacatatacataaattgaaatgtacgattatattgtatattacacaatctgccggcttgtcaagttttgttaagataattaattgttttgtatgttttacgaaatagaaagataaaacaattttaaaggtcatacgatacacaaacaagcaaacaatataatgattatactaatcaagcaaacagaagagcgtatgtatttcgcattaaagtatgggtaagaatgtcatattatgtttaaaaataccatgcaaataatatatcattttcaaaaaactgcaaactgaatgatgaaaaataataaaagacgaaaataaaaaccgtttagagcctttaatttacccttcaaaaggtatttgatggtagtttattttatacttttacatcattacaaagtattttctttatcgctagccactacttttgttttttttttatttttgtctttctgacgaatccattaacagatccatttttgaatacatcatagacgaagaagcctgccaagccatgagccatcatgaggaaaaattgtaatcagagggagcaatctctggtcaatcggctggtggggtagtgctttccaagtaagattttacgagccaactatgatgagtctgtgagccctgtggtgccgccaaatactttgtcacgtccatatccatattccttacaatgatggtctcgtttggtattcaagctaacaataaacatagccatcttccttcacggtcaacatacacgtccacatttgaatagaatgtatttcaaaagtaattgccattattaattaattcatttgaatcttaatacaatgagtagccagaccctttcctgcactattccgtgggaatacctctccagactttatagcgaattttcaataccatcctgcaatgttcctttctagttcctaatcgcatttcctgtatcttatgagccagtttaaaaaagacaatatttcataaaataaataaacaactcactgataacgacttacctattgcagtttctggcggggttgagttggtttgatcacgttgggacaaaatgttgagcgggtcctcactgcgtaagtagccgttgtgctctgggtgatactggaacaccacctctcccctgatgacccgcacgcggggaccatgggctcgagcggtgaacttaaccttcccacaggtgtctggccggagacgacgatgagctcgtaagccgctgacaactacaaagtatttatcgcatccgtagcatttataccgcttcatcccaatatgccgtgatagatgggaaattaaagtttcccggtgagtaaagtctaacgagcatatctgcaaaggggaaacagaaaattgcaataaatcaattaacaaatgtctaatttcgctaaggtaagcataggctcaattcttataccttctcaccttgcacttaaatggtttctctccggtgtgacgacggtggtgtacccgcacttgtccaggagttcggaaacgtttgtcacagtagctgcactggtaaggcagttcccccgtgtgtatggacttgtgaatgcgcaaggctccaaaagtagtaaacacttttaagcattcggtgcactggaacgactgattttttttgggcttcttggagacctttggtttttctatatttatacttgtcggggataaacctttgttaacaggcacattggatagtgctgatgtctggcctgttaatggagcagacgttttacttagcaataaaggcaaattaacagtattgggtagttctggaggaggcacaggcgtttgtggattcaatggcacatgcactctttgagttgcagcatttgctgagtcctgtgaaagtactgcaagggcaattaaaacgagcacgttcaaaattttagtttacttacttttagaaggcattaaaaccactttaaggacgttacacttttcatcggttaagtcgtgcttgttagtcagatgcgcacgaaatgcgcaatgcttctcaaacattcgctggcatagcggacaagtccacataaatcgatatagcgggtattggatctccagttccctggccaccattaaagccgacgggttgagcatcagttctacgggtttgggtgcatccatgggagacgacgttgattcatccatcgttactttcgaggattgtagcactgttcccggcagtggcaatgtcttctctatggaccgaatttgattacgaaattcattgattatcttcatggattcgggtctgctcttggaattgttaaacgagtcgacaagaaagcacgatgatcgactgtgagtttgggttggttgcacagtcttagcagacgcatgaggattacccatggaaccgacagtacttatacttatcgtcttcggaatctttatgaaattggttgaattctccgtaccactcagagttacggtgggagagtccttaggggcagccggagcttgacctggcgtcttaaaaatttttgtgttgggaggcaacttgatgaccatgcagttactaggtaacactttcagtatattggctgcaattgaggaatttgaaggttcttggttggaaatcggaatattcgcatcatcggatatcactgagtgattggatttcttgttaagagattccacattagacgttagtagtccatttcgcttaacacctgctgagaaggtagtaataattatgtaactacttttgttattaattgcaaagaacttacgttttaagtgcatctgatttttggtagtggccagagcaggcaggcgcagtttattcctcaacggagtatgtatggctgtccagacgctaccatttgactgttcctccttaatcctactcacatctggcatttcctcgtcctgtggttccaattttacattgagtggagggttgtcttccaatagcattcggtctgcttcctctgcgttaagtggctcttcttttatttgcacatagcaattcgactcttcaggtaccggcgtactaactgccacaagttccggctttgatgatgacccctttctgaaatccagcaggctgcaaaagtcctggctctgcttcctatgcagattgaggctctgtttggactcaaaatgccgacgacaaatggagcaaacaaagcgatatacgtaaatgtgcttttgcatatggctggccagatcgtccgcgctattggccataaaatcgcaaacctaaaacgttcactgtttaatcaatgtgtgtataaaagttaaatgcagatgagctcaccctacagcacaacacacgccctggctggaaatgctggcgatattcatgctcaaggatcttttcaagcgtgtccagccagataccacagcccaggcgacaaaaatgtaggttcatttcgtgatgaacccggtgacttgatatatcctgttggcttttaaacttgtactggcaaatatcgcaatgttttggatttgggttgtcctccgattcagacgcaaatatctgggggtgtaagtattagctgattaaattttgtattaatgcgttagcaaaaatcgtacatatacatgtagcttgaatttagatagataattatgattacatatatttacatttattatgcagcctaaatatgatactttgtaaaattatgacaaaatgtttaatatatatgtttagatttatgacagttatgtcttcctttcgattaatatttagatcccgtaacggaatctccacgctaccacgcgacccttgtgcttttttaggttatgtacatgtatattttttacctgttggtggccgagttccaggctggcgataaataggcgctcgtcctcggaacgcaaacgatccctgatcggcactgttatcatttgagatccctcgtccaaaattttcagcgtatcacatgctataaattggccgaatttagaaagaattaaaagttaacggtaaagtgcgtaatagaatagcagagacaccaacactacggcgcccagcagcactcacacacacgcatgtgggaggagagcatgcaagcttaccgctcagaattctgattgaactgtccgtcacttcgtcctgcggctccatcttgatcttgatgtcctccatgtcaatttcccccttggccagcgccaaattcgcgagaattccgttctgatcagaggatatcagatcaacaactatcaatataaagaagagagcagcagcgcaataaataccgctgtataccgctgcgatcagaagacgactatcgataggcgcggcgttgccagatcaagtggcgcaattatcgggtggagcggtcagccttcaccacttggggtggttatcgattgacgatagccctcgcaatttgggaaagtaaacaaaagcaaatccgttgaagaaatctgttaaaaatccaagatatgagcaatagcgaggactcgcagcagtatctgaacgacatgctggtcaaggaggaggacgaggcgtccggcggtaaacaaaagaccatccacaaccgcgtgttttgttgcttgactttgatttttcacccccgcagacgattcggacaaacaggatggagggataatgctacgcgaacaggaccgatttctgcccatctgcaacatcattaagatcatgaaggttccggtgccccagaacggcaagatagccaaggatgcacgagagtgcatccaggagtgtgtctccgagttcatatccttcattagcagtgaggccatcgaacgtagcgtcgcggagaatcgcaagacagtcaacggggacgacctgctggtggcgttcagcaatctgggattcgacaattacgtggaaccactgtccatttacctgcaaaagtaccgagaggtcagtgagattacgctatgcacagcagttaataaccaagtaacccattgcagtcgaacaaatcggatcgtaatctctttctggacgccagttatccgcacaacgaagatgggtcctccgcaaacgatgcggggaaacagtaacccctttcttacttaccctgttagttaaggttcttttgacattaaggaaatatttgtctaattcaaagtgttttgtttaatcctaacagtacaccttgattgactatttaagttaatattatcattactattctttctgattatttaattttttattttgtatatatgatatatgattttattttaattgtaaccacagattttatatgcataaatccattttta

SEQ ID NO: 42617 - DNA, 2467 bp, DROSOPHILA
cggtatttattgcgctgctgctctcttctttatattgatagttgttgatctgatatcctctgatcagaacggaattctcgcgaatttggcgctggccaagggggaaattgacatggaggacatcaagatcaagatggagccgcaggacgaagtgacggacagttcaatcagaattctgagcgcatgtgatacgctgaaaattttggacgagggatctcaaatgataacagtgccgatcagggatcgtttgcgttccgaggacgagcgcctatttatcgccagcctggaactcggccaccaacagatatttgcgtctgaatcggaggacaacccaaatccaaaacattgcgatatttgccagtacaagtttaaaagccaacaggatatatcaagtcaccgggttcatcacgaaatgaacctacatttttgtcgcctgggctgtggtatctggctggacacgcttgaaaagatccttgagcatgaatatcgccagcatttccagccagggcgtgtgttgtgctgtagggtttgcgattttatggccaatagcgcggacgatctggccagccatatgcaaaagcacatttacgtatatcgctttgtttgctccatttgtcgtcggcattttgagtccaaacagagcctcaatctgcataggaagcagagccaggacttttgcagcctgctggatttcagaaaggggtcatcatcaaagccggaacttgtggcagttagtacgccggtacctgaagagtcgaattgctatgtgcaaataaaagaagagccacttaacgcagaggaagcagaccgaatgctattggaagacaaccctccactcaatgtaaaattggaaccacaggacgaggaaatgccagatgtgagtaggattaaggaggaacagtcaaatggtagcgtctggacagccatacatactccgttgaggaataaactgcgcctgcctgctctggccactaccaaaaatcagatgcacttaaaacgtaagttctttgcaattaataacaaaagtagttacataattattactaccttctcagcaggtgttaagcgaaatggactactaacgtctaatgtggaatctcttaacaagaaatccaatcactcagtgatatccgatgatgcgaatattccgatttccaaccaagaaccttcaaattcctcaattgcagccaatatactgaaagtgttacctagtaactgcatggtcatcaagttgcctcccaacacaaaaatttttaagacgccaggtcaagctccggctgcccctaaggactctcccaccgtaactctgagtggtacggagaattcaaccaatttcataaagattccgaagacgataagtataagtactgtcggttccatgggtaatcctcatgcgtctgctaagactgtgcaaccaacccaaactcacagtcgatcatcgtgctttcttgtcgactcgtttaacaattccaagagcagacccgaatccatgaagataatcaatgaatttcgtaatcaaattcggtccatagagaagacattgccactgccgggaacagtgctacaatcctcgaaagtaacgatggatgaatcaacgtcgtctcccatggatgcacccaaacccgtagaactgatgctcaacccgtcggctttaatggtggccagggaactggagatccaatacccgctatatcgatttatgtggacttgtccgctatgccagcgaatgtttgagaagcattgcgcatttcgtgcgcatctgactaacaagcacgacttaaccgatgaaaagtgtaacgtccttaaagtggttttaatgccttctaaaagccagacatcagcactatccaatgtgcctgttaacaaaggtttatccccgacaagtataaatatagaaaaaccaaaggtctccaagaagcccaaaaaaaatcagtcgttccagtgcaccgaatgcttaaaagtgtttactacttttggagccttgcgcattcacaagtccatacacacgggggaactgccttaccagtgcagctactgtgacaaacgtttccgaactcctggacaagtgcgggtacaccaccgtcgtcacaccggagagaaaccatttaagtgcaagatatgctcgttagactttactcaccgggaaactttaatttcccatctatcacggcatattgggatgaagcggtataaatgctacggatgcgataaatactttgtagttgtcagcggcttacgagctcatcgtcgtctccggccagacacctgtgggaaggttaagttcaccgctcgagcccatggtccccgcgtgcgggtcatcaggggagaggtggtgttccagtatcacccagagcacaacggctacttacgcagtgaggacccgctcaacattttgtcccaacgtgatcaaaccaactcaaccccgccagaaactgcaatagtctggagaggtattcccacggaatag

SEQ ID NO: 42618 - protein, 784 aa, DROSOPHILA
MEDIKIKMEPQDEVTDSSIRILSACDTLKILDEGSQMITVPIRDRLRSEDERLFIASLELGHQQIFASESEDNPNPKHCDICQYKFKSQQDISSHRVHHEMNLHFCRLGCGIWLDTLEKILEHEYRQHFQPGRVLCCRVCDFMANSADDLASHMQKHIYVYRFVCSICRRHFESKQSLNLHRKQSQDFCSLLDFRKGSSSKPELVAVSTPVPEESNCYVQIKEEPLNAEEADRMLLEDNPPLNVKLEPQDEEMPDVSRIKEEQSNGSVWTAIHTPLRNKLRLPALATTKNQMHLKRKFFAINNKSSYIIITTFSAGVKRNGLLTSNVESLNKKSNHSVISDDANIPISNQEPSNSSIAANILKVLPSNCMVIKLPPNTKIFKTPGQAPAAPKDSPTVTLSGTENSTNFIKIPKTISISTVGSMGNPHASAKTVQPTQTHSRSSCFLVDSFNNSKSRPESMKIINEFRNQIRSIEKTLPLPGTVLQSSKVTMDESTSSPMDAPKPVELMLNPSALMVARELEIQYPLYRFMWTCPLCQRMFEKHCAFRAHLTNKHDLTDEKCNVLKVVLMPSKSQTSALSNVPVNKGLSPTSINIEKPKVSKKPKKNQSFQCTECLKVFTTFGALRIHKSIHTGELPYQCSYCDKRFRTPGQVRVHHRRHTGEKPFKCKICSLDFTHRETLISHLSRHIGMKRYKCYGCDKYFVVVSGLRAHRRLRPDTCGKVKFTARAHGPRVRVIRGEVVFQYHPEHNGYLRSEDPLNILSQRDQTNSTPPETAIVWRGIPTE

SEQ ID NO: 42619 - DNA, 4002 bp, DROSOPHILA
taatgattaaataccaacttgatctagcaataactcacagggataagctgcaatttttggtttggcattggacacggccttaagaagggtgcttttgccagcgttggggaatcccacgagacccacatctgctattagctttaggtccagatttacagtgcgattctccccgggacgtcccagaaaatttgtggccgtgcatccgccagtacctccgcccgccacaatgcatgtcgcctcgtgctcgtcgaggtcggcgatgagtttttgttggtcgtcatatacctggacgcccacaggcacctcgatcctctggtcagctccacggcgtccaaagatgctggctttgctactgtcctcgccactggatgctgccactcgcttatccttcaatccctggacgaccttgcgaagggtgagtccttcctttgccaccaagtagacgcaaccgccttggccaccaactcctccgtatttgggcagtccatttccaccatgtcctccacgaaccgctaggcgcagtgtgtccagaaaagtgggccggaagtgggcacgaccggtctgggcattaaaaccttttgatattacttttgatttaggtataatagtaatgttctcacagatttgctggattttaacaggaatttaaagatttgcaccatcgcgcaggcggcattatacaatagcgatgagcagacctgcaaaaagtgactgattcactgtgaccacggagggaaataaatcggtgtcatctaatttagctcgggcaaaaacttctaaattaccaatttaagggtggaggagacctcatcattgccacgtaagtcgtggattaattttagtatttattagttaataaccagtgaaatccattcaattcacagttatgctgaacgcgaccaatatcttttcttctatcgataaatcatcacaagcagctgattgacaaaaacaaggtagaagaagacgcataccaacacgtgcgattgtttattgtgaaatggattccggtatttgctacatcaaaccagagtaagtaagcttaatggcgaatatttggttaattcaattcactctttataccttttagatacctggtaactgaagccgatggcggcagtgctgcagctaacaccgaaaacagcgacacaaacaaaagaaaacgcgaggacggtggagaagtggaagccggtgaaaaaaagaaatgggataaaaaggaacgcaaacgcggacagaacaaggttcgtcaataatatataatatagatactatacaaaatatcgtatttttagaaccgcccagttttcaaggacgagcggtactcgcatctgtgccactcgctgatcgatggaaccggtggagaaccttgttccctggccaactgtcgctatgtccacgacctggacgcctacttggccgccaagggagaagatttgggccctgaatgttatgtgtacaccaccaagggctactgtgcccgcggtgtgagttgtcgctttgcaaaggcccacactgatgaacagggcaggaacctcaaaagggaggactacgatgaaaatgctcctccaaccacatgcaatggcgtcagttcaggtgggcaattcttctgcacctatcagctaactgatactaaagtaccttgataaactcattaattgaaccccttttcagaactccaagtgcgtctacgaaaacatgaatatgacttcagtcggagcaaggagcttattaaaatggctgaaaagctgagggatgcccgaaaactaaaggaacaacaggagaaggaaaagaatccgtctgaagagactggagaaaaacaacctagtgaaaccaccgagatattagatgcagaaaaacagacggatactaagagtaaaccaactgccactggttgtgcaattgatgattccgctatcggcagagatgctgaccataagcccgccgtggatttccgcgagaaactcgtgttgtcgccactgaccacgttgggcaatttgcctttccgccggatctgcaaggaattcggtgcagacatcacctgtggcgagatggcctgcgctcagcctctcctgaagggtatgggccaggagtgggccctgaccaagcgacaccagagcgaagatgtctttggagtccagctatgcggaaataatcccaacatgctcaaccaggcggcgcaggttattcatgagacggcccaggtggacttcattgatcttaatattggctgcccgatagatctgatctaccagcaaggcggtggcagtgcgctgatgcgacgaaccaatatcttggagctgacagtgcggagttgtgcagccctgtcggaccgcctgcccttcaccgtgaagatgcgcaccggcatctatgcagacaagagcgtagcgcacgaacttcttccgcttgttgaagagtggggtgcctcggcggtgaccctgcacgggcgatccagggagcagcgctacactaaacacgccaactgggcttacatcgaggagtgtgccgccaaggcaaagtgcatgccggtgatcggcaatggcgacatactcagctacgaggattacatggagcgaaggacgctggcgcctcacgtttgctccgtaatgattggacgcggcgcgttaataaagccctggatattccaagagataaaggagaaacaggcctggtccccatcgtccgggcaacgctacgagatgttgcaaaagttctgcaactacggactggagcactggggctcagacaccaagggcgtggagaccactcgccgattcctcctcgaatggcagtccttcttgtaccgatacatacccgaggctttgcagaccgcaccgccgcaaaagatcaacgctcgaccgcaaaagtaccgcggacgcgacgaaatggagacccttatgagttccggcaacgcagctgactgggtaaagcttagtgaatcgctgctgggtcgagtgcccgaaggcttcacctttgtacccaagcacaaggcgaatgccttctaggtttctttcgtgtgtaaatttgtatttttgaatttatgcgtagtctgacataattaaatttataatttaaatgaaatgaacagcttgtttaagatataataatataacatatatatatagatatatatatgttatataagtatatattacatatgtatatatgttaagccattcttttaattcgttaatcttaaacatatatatatatgttatataagtacatattacatatgtatatatgttaagccattcttttaattcgttaatctcacgattggaatggatgtatagtaatctcttcgctggtacctaaacaactcaaaaatatgtttccataatacttgacttgtccaattcttgcttactataagatgaacaaataccagttgttcaatggttgcaacaccaatcttctctcctctagctttaaaatgtattatttaattgggccgaaatcccgccggcactgtaataccgggccacaggcggagtaagcacctagcactccgtctgatttcagaaatcagttcctccaatggaggaactaccagaggttaagccactctggaatgcagctagaactagttgagaattattcaggccaattagaaatggttttgtcaatttttttgagcataagtctttgggcagaacggctgaaggacttgcatttcttagtaaaaaatataattgatctttattgatacgttactgtagtcacaacaatcactttaagtagctaagtgcctcctccacgtcggacttggatcctaggaatatgggactgcgctcgtggatcttcttgggcacaatgtccaaaatgctgatctttccgtcgctggccagacctccagcctggatcatcagataggccatgggcacgcactcgtacagcagacgaagttttccgctgggagcggactttgttgccggatagataaagatgccgccgtatttaatggtgcgatgcacatccgcgaccatggaacccacgtaccgc

SEQ ID NO: 42620 - DNA, 1815 bp, DROSOPHILA
atggattccggtatttgctacatcaaaccagaatacctggtaactgaagccgatggcggcagtgctgcagctaacaccgaaaacagcgacacaaacaaaagaaaacgcgaggacggtggagaagtggaagccggtgaaaaaaagaaatgggataaaaaggaacgcaaacgcggacagaacaagaaccgcccagttttcaaggacgagcggtactcgcatctgtgccactcgctgatcgatggaaccggtggagaaccttgttccctggccaactgtcgctatgtccacgacctggacgcctacttggccgccaagggagaagatttgggccctgaatgttatgtgtacaccaccaagggctactgtgcccgcggtgtgagttgtcgctttgcaaaggcccacactgatgaacagggcaggaacctcaaaagggaggactacgatgaaaatgctcctccaaccacatgcaatggcgtcagttcagaactccaagtgcgtctacgaaaacatgaatatgacttcagtcggagcaaggagcttattaaaatggctgaaaagctgagggatgcccgaaaactaaaggaacaacaggagaaggaaaagaatccgtctgaagagactggagaaaaacaacctagtgaaaccaccgagatattagatgcagaaaaacagacggatactaagagtaaaccaactgccactggttgtgcaattgatgattccgctatcggcagagatgctgaccataagcccgccgtggatttccgcgagaaactcgtgttgtcgccactgaccacgttgggcaatttgcctttccgccggatctgcaaggaattcggtgcagacatcacctgtggcgagatggcctgcgctcagcctctcctgaagggtatgggccaggagtgggccctgaccaagcgacaccagagcgaagatgtctttggagtccagctatgcggaaataatcccaacatgctcaaccaggcggcgcaggttattcatgagacggcccaggtggacttcattgatcttaatattggctgcccgatagatctgatctaccagcaaggcggtggcagtgcgctgatgcgacgaaccaatatcttggagctgacagtgcggagttgtgcagccctgtcggaccgcctgcccttcaccgtgaagatgcgcaccggcatctatgcagacaagagcgtagcgcacgaacttcttccgcttgttgaagagtggggtgcctcggcggtgaccctgcacgggcgatccagggagcagcgctacactaaacacgccaactgggcttacatcgaggagtgtgccgccaaggcaaagtgcatgccggtgatcggcaatggcgacatactcagctacgaggattacatggagcgaaggacgctggcgcctcacgtttgctccgtaatgattggacgcggcgcgttaataaagccctggatattccaagagataaaggagaaacaggcctggtccccatcgtccgggcaacgctacgagatgttgcaaaagttctgcaactacggactggagcactggggctcagacaccaagggcgtggagaccactcgccgattcctcctcgaatggcagtccttcttgtaccgatacatacccgaggctttgcagaccgcaccgccgcaaaagatcaacgctcgaccgcaaaagtaccgcggacgcgacgaaatggagacccttatgagttccggcaacgcagctgactgggtaaagcttagtgaatcgctgctgggtcgagtgcccgaaggcttcacctttgtacccaagcacaaggcgaatgccttctag

SEQ ID NO: 42621 - protein, 604 aa, DROSOPHILA
MDSGICYIKPEYLVTEADGGSAAANTENSDTNKRKREDGGEVEAGEKKKWDKKERKRGQNKNRPVFKDERYSHLCHSLIDGTGGEPCSLANCRYVHDLDAYLAAKGEDLGPECYVYTTKGYCARGVSCRFAKAHTDEQGRNLKREDYDENAPPTTCNGVSSELQVRLRKHEYDFSRSKELIKMAEKLRDARKLKEQQEKEKNPSEETGEKQPSETTEILDAEKQTDTKSKPTATGCAIDDSAIGRDADHKPAVDFREKLVLSPLTTLGNLPFRRICKEFGADITCGEMACAQPLLKGMGQEWALTKRHQSEDVFGVQLCGNNPNMLNQAAQVIHETAQVDFIDLNIGCPIDLIYQQGGGSALMRRTNILELTVRSCAALSDRLPFTVKMRTGIYADKSVAHELLPLVEEWGASAVTLHGRSREQRYTKHANWAYIEECAAKAKCMPVIGNGDILSYEDYMERRTLAPHVCSVMIGRGALIKPWIFQEIKEKQAWSPSSGQRYEMLQKFCNYGLEHWGSDTKGVETTRRFLLEWQSFLYRYIPEALQTAPPQKINARPQKYRGRDEMETLMSSGNAADWVKLSESLLGRVPEGFTFVPKHKANAF

SEQ ID NO: 42622 - DNA, 2643 bp, DROSOPHILA
gtgtggctgccacagggtgacaaagtctagtgtgaaacggacatatcgcacttatgtcttttacataccaactgttccaatagcaaggcgcaggcatagttacgtgcgcgagacagagagggaaacacacactcagcttccttcgcaaaaaataatatgggagagcgaaaaaaaataacagaaaagacggggcgttattcgctgttattcggcacagaacgcgtctcgaacgatgatgggaaaatggtaaaacaatggctttggcacaattaaaagacctcaaagacgccaaacggttattcgtttatgttttcatctcttcctctccctcaccaatcagcagtcgcagtcgcggcagctattatttattattttcgttgctgccgcacaatacactgacacacatttttaaatagagaggagatacttttcagcatatctttttcctttggcacgcacacgagcatgcagacacacgcacacgcaagggcataccgcacacacacacacgtacgctagcagacggcgggtgtgtaagcccaattttcgcattcgtacacaccttttctcgaatagatcaccgtggcaatggcaatattacaacatttctcactgtccgtcccagtgcacaattaactggcttccgatccgcagccttttacaacgcgacaacaaatgtgacgataacgattaaaataccaccggccttattataacgcactatttaataccactgcacatacaagaaataccaaatacaaatacctagcaattaaaaactactttggtatttaaattagttggaaattaaataagtatgctacatattaattatattagccttttagttttaggaaactctatgagttaaagaaagtatccaattatcgatatattgcctgaaatactacctacactgcttgcttgctatgttaatacagttcaaaacagaccgatggtattttctacctaacagcaagcagtcacatcgccacaaaaacataaacaaataaaacgatttgaagatgaatccgctaacaaatatgaaaaatgtgctcaaactgagcgaacacgaactgcaacatggcggaaagaagagctggcacgacatgtacaaggactcagcctggattttcgtcgcaggatttccgtataccctaactgagggcgacttggtttgcgtattctcgcagtacggcgaagtggtcaacatcaatctaattcgagattcaaaaacgggaaagtccaaggtaatgcttagttaccctttcaagaaagttcctgaaatcattgtttaaacttgtccagggcttctgcttcctgtgctacgaggaccagagatccacagtgctggccgtggacaacctgaatggcatcaagatcctcgataggacactaagggtcgatcacgtggccgactacaagcctcccaaggaaaacgagaagatggacgaggaaacccttcgcctttacatggagggctgtgcgccgaaacctcaacttcagcacatcaagactgagaagaaagacagcaaaaattatagatgataagataaggttagcttaaacatagcaaagcatgcaaacagaatttttatattaacttaaattttttagttattaaacgctaaattatactactacattcttttttaaagccagtaatttaaggtgcaagaatgaattggctttccaacctctcattcgccatcagcgctcgcaaaggagtcgtcatcatcatcatcatcctcatcctcttcttcctgaccctccagttccttcagaatccttcgcttgtagcgctcataggcgctgcccctctcccggtcgacattgtaaaagtccacgtcgtccacaaacgagtcttcctcagtgtcgatcgtgtgcacgtagggatcgcgaaaggtggcatagtcatcatcatcgctggtgctggcaaactcatcctcgtcatcatctggaagaagaagcatatgcatattcataagcggaatctatgcaaacagttaacacagatcttaccgagcataaacttgttcatttgccggcacaactcatcatccgaacccatggcgcccgcttcgtcgtcgtccgggtaatcattggtaaagtagttctcctggttcgagtcctccgagtcgtagtcctcgtcctggtcgttgtagcaatcttctaggacaatctcgcccacaggaatcacactgcagaataggcgaaacaattagtgagtttatttcgattctttgatcacgcagcatttttaaattgaaacacaacaaagtttgtcacgtattttgagagtttctttatttagtttatattcgatttcgggcaacgctaggccccaacagatataaagcaaaacaaactaagactatgcacttaattagacttcagcactagtgttatccgtttttttttgtttattgtcggaatggaaaaagaaccaaaaaggcaactgacaactggcggaaactaaacgaaaaatgctcggtgagctgtttttcaaaaaaatgcggtgtgtgtgtgttcgtgtgtgggggtaaattattctaatctaatagctaattaattctatgaacataaggtaatgagagacatttgcctaaaacgattccaaatagtacactaattgtgcgtttt

SEQ ID NO: 42623 - DNA, 585 bp, DROSOPHILA
cataaacaaataaaacgatttgaagatgaatccgctaacaaatatgaaaaatgtgctcaaactgagcgaacacgaactgcaacatggcggaaagaagagctggcacgacatgtacaaggactcagcctggattttcgtcgcaggatttccgtataccctaactgagggcgacttggtttgcgtattctcgcagtacggcgaagtggtcaacatcaatctaattcgagattcaaaaacgggaaagtccaagggcttctgcttcctgtgctacgaggaccagagatccacagtgctggccgtggacaacctgaatggcatcaagatcctcgataggacactaagggtcgatcacgtggccgactacaagcctcccaaggaaaacgagaagatggacgaggaaacccttcgcctttacatggagggctgtgcgccgaaacctcaacttcagcacatcaagactgagaagaaagacagcaaaaattatagatgataagataaggttagcttaaacatagcaaagcatgcaaacagaatttttatattaacttaaattttttagttattaaacgctaaattatactacta

SEQ ID NO: 42624 - protein, 154 aa, DROSOPHILA
MNPLTNMKNVLKLSEHELQHGGKKSWHDMYKDSAWIFVAGFPYTLTEGDLVCVFSQYGEVVNINLIRDSKTGKSKGFCFLCYEDQRSTVLAVDNLNGIKILDRTLRVDHVADYKPPKENEKMDEETLRLYMEGCAPKPQLQHIKTEKKDSKNYR

SEQ ID NO: 42625 - DNA, 3663 bp, DROSOPHILA
aggaagtctgcggcaaatagtgacatttggatgttttcgggcagggagaattgctgacaaagaccgcccaccgaaacacgcgtggctgactgggcatactagaaatatgtggaaggcaaattaaatattcggggtagactggtacacatcattttactaccgtgtcatccttctcgaccaccacaacgttaagaccgtcgcgggccttctccttcagccaataggcgatggagctgcccactccaccgccgccaatgatgagcacatcgcaatgggtctggaagtcatccggcacagtggcttccttgctcttgtcgcgctcccctgaaaagtgaaactggctctgtgtcggaatgggaactttctcggtctccggttcctttggtacaaagaactccttaactttgcgcatatcgttcccgagcaaacggagtgttcgtcgtatggggtgcaggtcttcgccggatttgtcgcccccggaagatccacttccattgctcgttgctccggccgagaaattacggcgctgaaggagacccaccacttgtctgtaccgcaacattttattctctttaattttaatttaattcatattccgtattaattttttattttgtgttattttgtaatagtaataacgtgcgatgttatcggagtatcgatatcgaaaaggcttaacggaattgtggtaatgttttattgcaatttaaataaaaatacgcttttactgagtgcgtaacttaagaaaaggcttaacggaattgtggtaatgttttattgcaatttaaataaaaatacgcttttactgagtgcgtaacttaagaaattcctaacccaaattaaagcaatagatacatttactgtaaaacattaaaaataaattcctataacatatgagactgaaagttcgctcagtgtaccgtaaaacgtatcgataaattgaaacgtaacggcttaacagctctgttaaccaactaaatttaccagcactgcctgtagccgaaaacgaataagaagaagaagcgacattactaggcatttttgattgggattgagaaaaacaaaagaaaagtcggctatatttgtgaccccagtaaattgagagttccattacaaaatgaccaacgcaacggacatcggtgctaacgacgtggagatggaggtggatccaacggcggagacgctggctgacgagaagaagaaccaagatgtggccgccgtgcaggagatccgcgagcagattcgtcagattgagaagggggtagcctcgaaagagtcgcggtgagtagtgcaagaattaaaatcttgtcccttccttattatggctcatttccgccaacagcttcatcctgcgcgtccttcgcaatttgcccaacactcgtcgcaagctgaacggcgtcgtcttccggaatcttgcacagagtatttaccccgctggtgcagatcgtgaggcggccgtggctttgatgcccgctgtggagaaagacgccaccgagctgcccgatgttcccaaaaaacaagttgccaccaaggctccaatcgccgaggtcgatgcctacttctacctgctcctgctggtcaagctcatcgacgccagtgatttaaagcgggccggaattagcgccgacgccctaatggccaaaatctccatccaaaaccgacgcacccttgatctgattggtgccaagtcctacttctatttttcaagagtggcggagctaaaaaactcactggaaggcatacgctcgttcctgcacgctcgtctgcgcaccgctacgctgcgtaatgattttgaaggccaggcggtgcttattaactgtttgctccgcaactacttgcactatgctttgtacgaccaagccgacaagctggtaaagaaatccgtctacccggaatcggccagcaacaatgaatgggcgcgtttcctgtactatctaggtcggattaaggccgctaagctggagtacagcgatgcccacaagcatctggtccaggccctgcgtaagtcgccgcagcacgctgccatcggctttcgtcagacggttcaaaagctaattatcgttgtggagctgcttttgggcaacatcccggagcgtgtggtgttccggcaagccggtcttcgccaatctcttggtgcctacttccagctcacgcaggccgtgcgtctgggcaacttgaagcgcttcggcgacgtggtatcccaatacggacccaagttccaactggaccacacattcaccctgattatccggctgcgccacaatgtgatcaagacggcaatccgctccatcggactatcgtactcacgcatctcgccgcaagacattgccaagcggctaatgctagactccgcggaggatgccgagtttattgtatcgaaggctatacgggacggcgtgattgaggctacgttggacccagcccagaatttcatgcgcagcaaggaaagtacggacatctacagcacccgggaaccgcagctggcctttcacgagcgcatctcgttctgcctgaacctgcacaaccagagcgttaaggccatgcgctatcccccaaagtcctacggcaaggatttggagagcgccgaggagagacgcgagcgggagcagcaggaccttgagctggccaaggagatggccgaggatgatgaggatggtttctaagcggctgattctgcaaattaatttgtgcttgcattcatttttatagaaatataatccgcaattaaataagttacaataatttcggaacttttttaattaggtattggaaatcaaaaatagttcagaactgatctttctttttattcaagcaaaaagttgtatgttgttgttggtagacaatcaaaaatttcaattcggttagaaatggaaaaacattttaaaaatgtcactcttctggcagccttggcgcgttaatttaaaacgaagtctggcaacatagattcatattcttctttagatcttttccctccaaagctattttattaaagatcccttaagtacattggcaggacttttctctgattgatagaggtaatttatgatatgtaaattatagatggaaaagatgcaaatattatttcaattactttaaacacgaccttccacaaaaagcacactttttctgacgaaggttttggtcggcagtattaacggtcacactggcgcaaacaacacaaacagcagccacggtcacacaaatcaaagtggaaaaaatttttagacaaaaaggtgcacacaatgcaaattaattaaaggccgtgcgtattaaatgccctaatacgcgatcctacgtactgtattttgctgccgaaaagtgcaacgcgcgcctatcggggagtttcgcggaaattgctgggttttttgtgacagcggcgagtagtctcctccgaataacagcggccgaacagcgagcgttttgcgaagcagcgagtgcctggccaatgtggtgcagccccccgccacccgccgcccgcgcaccccctaccccgctaacgcgcaaaatatacgcgactagttgtagttgtgggcagcagagcagcaggaaaagcagcagcagccgatcagctctgcctttgtgagcggattagtggcgaagaagccagcgaaaagccaattaacagtgccccgggaagctgggccggtgtccacgagcggatct

SEQ ID NO: 42626 - DNA, 1602 bp, DROSOPHILA
cgaaaacgaataagaagaagaagcgacattactaggcatttttgattgggattgagaaaaacaaaagaaaagtcggctatatttgtgaccccagtaaattgagagttccattacaaaatgaccaacgcaacggacatcggtgctaacgacgtggagatggaggtggatccaacggcggagacgctggctgacgagaagaagaaccaagatgtggccgccgtgcaggagatccgcgagcagattcgtcagattgagaagggggtagcctcgaaagagtcgcgcttcatcctgcgcgtccttcgcaatttgcccaacactcgtcgcaagctgaacggcgtcgtcttccggaatcttgcacagagtatttaccccgctggtgcagatcgtgaggcggccgtggctttgatgcccgctgtggagaaagacgccaccgagctgcccgatgttcccaaaaaacaagttgccaccaaggctccaatcgccgaggtcgatgcctacttctacctgctcctgctggtcaagctcatcgacgccagtgatttaaagcgggccggaattagcgccgacgccctaatggccaaaatctccatccaaaaccgacgcacccttgatctgattggtgccaagtcctacttctatttttcaagagtggcggagctaaaaaactcactggaaggcatacgctcgttcctgcacgctcgtctgcgcaccgctacgctgcgtaatgattttgaaggccaggcggtgcttattaactgtttgctccgcaactacttgcactatgctttgtacgaccaagccgacaagctggtaaagaaatccgtctacccggaatcggccagcaacaatgaatgggcgcgtttcctgtactatctaggtcggattaaggccgctaagctggagtacagcgatgcccacaagcatctggtccaggccctgcgtaagtcgccgcagcacgctgccatcggctttcgtcagacggttcaaaagctaattatcgttgtggagctgcttttgggcaacatcccggagcgtgtggtgttccggcaagccggtcttcgccaatctcttggtgcctacttccagctcacgcaggccgtgcgtctgggcaacttgaagcgcttcggcgacgtggtatcccaatacggacccaagttccaactggaccacacattcaccctgattatccggctgcgccacaatgtgatcaagacggcaatccgctccatcggactatcgtactcacgcatctcgccgcaagacattgccaagcggctaatgctagactccgcggaggatgccgagtttattgtatcgaaggctatacgggacggcgtgattgaggctacgttggacccagcccagaatttcatgcgcagcaaggaaagtacggacatctacagcacccgggaaccgcagctggcctttcacgagcgcatctcgttctgcctgaacctgcacaaccagagcgttaaggccatgcgctatcccccaaagtcctacggcaaggatttggagagcgccgaggagagacgcgagcgggagcagcaggaccttgagctggccaaggagatggccgaggatgatgaggatggtttctaa

SEQ ID NO: 42627 - protein, 494 aa, DROSOPHILA
MTNATDIGANDVEMEVDPTAETLADEKKNQDVAAVQEIREQIRQIEKGVASKESRFILRVLRNLPNTRRKLNGVVFRNLAQSIYPAGADREAAVALMPAVEKDATELPDVPKKQVATKAPIAEVDAYFYLLLLVKLIDASDLKRAGISADALMAKISIQNRRTLDLIGAKSYFYFSRVAELKNSLEGIRSFLHARLRTATLRNDFEGQAVLINCLLRNYLHYALYDQADKLVKKSVYPESASNNEWARFLYYLGRIKAAKLEYSDAHKHLVQALRKSPQHAAIGFRQTVQKLIIVVELLLGNIPERVVFRQAGLRQSLGAYFQLTQAVRLGNLKRFGDVVSQYGPKFQLDHTFTLIIRLRHNVIKTAIRSIGLSYSRISPQDIAKRLMLDSAEDAEFIVSKAIRDGVIEATLDPAQNFMRSKESTDIYSTREPQLAFHERISFCLNLHNQSVKAMRYPPKSYGKDLESAEERREREQQDLELAKEMAEDDEDGF

SEQ ID NO: 42628 - DNA, 5049 bp, DROSOPHILA
gataaattatgtaaattatcaaattgatcatacaaaggtctatgtaaaactaactttgagtgcctttttattttcttaaacagaagataaaataagtgtgatcctttataatatttctagtttaaacaatgtgggccatttataagaaagcgattaaaatttgtcatgttcgtacttagtatgttcataacaaatgttttatgttattccaacttaaatcttcagttaaaacaaacacaaatcgttacgcatgtcacattaccaattgcgtggctcatttgacagtcccatttccttgcttttcacctttaaatagaccgaaataaacaaaactggttctcatttgatgggcggcacaattgattatgggcccatatacttacatatatgtatattcagttaggcacgactggaggtgcgcgtatttttttaaaaatatttacttgacaaacaacaaaagtgaaacgcgcatttaaaacgctaattgacaatttgagcgacgagttgcccaagccgaatgatatatgtaggttttttaagcgaaggcaaatataatattctgtcgaattaacgtaatacacagttgtttttctacttgttttttgctttcttttcgtatccagctgagtacatattttaattttcgccttttgtactaagagatcattgtcgtatcaattagcttgataaatctgctcgtgcctggaagattcgattgcgtgtcgccaccattttggccattcgatcagcttagacatttgctggggtaatagaaacgctaatatattcgtaggacccatcagtcatttcggttcggtcaacacaattaacgcttaatttatcataattaaccattgtggccgcgacagctaaagccacaataaaataacaatacccaattatcattcaattgcagtagcggcggcatccgtggcagcagcagcagcagcagcagcggcagcggcagcagcggcggccggagcgggatcgggagcggtagccggtggcggaggggccacatccacatcacccacatctgtgcaaataccacccggctttggcggcggcggctccactggcggcattccgcacggtgcaggtggacccacggggagcacattgaacaccctgatgtcacagcatcgcctcctggaattctcacgtttcggtggactgcgtggctatgacattgcccagcacatgctaacccagcagggagctgtctccaagttgctaggtgagttgtgagcccttgaaagggacgaccgctcagtttctcagttccttccctcatcagataactaatgggtactttgttttcgatttgtttgctaatttttatgataaacatgttattatcctgcgagttgcccctaccatcccctgcgtggcgtatccctcgtgtgcgcagccgtgtaatttggccacttaaaattgcataaactcctgactggcggtggccaaaacgcggctggctcattaatcaaaatgcggcttattcacgagcgggtattccttggtggtagtgttggttggtgcgtgctgccgtgcactgaaagaaaaaaatgcttaattccaaataaggatatgtgatcacatttattccatgtttagaattttttaagtcttttaaacccgtcattacagtaactttaagtagttaaaatcactcatttttaagttttccaattcttgagctgctctggtttctaccagtgtatttgccaaggcttgtattgttttcccattcatattttccatacatcacatgttgatgaaacgagcagataaagatattagcaaccagggttaatccttgctgccagccaaaaacagatggattgccaaaaccaggctggcaaagtcataaatccattgtctcataatttaactggaattgtgctctgattcttgcaggctcgctgcgaccaccgggcttaattggtggctcaaagcccaaggtggccacgccgacggtcgtctccaagatcgaacagtacaagcgcgagaatccaacgatcttcgcctgggagatacgagaacgcctgatttcggagggtgagtgttccacataattgcagctaatccgcggacgcagattgaacgctgattgatcggcggtcgcttttagcttttgatctcgatcttcgactgctcggtaattgcgtaatcccgccttgcaggtgtctgcactaatgccaccgctccatcggtgagcagcatcaatcgcatcctgcgcaatcgagccgccgagcgggtggccaccgagtttgctcgcaccgccgcctatggcctgtacccgccaccccctcatccgtacggtagcttcacctggcatccggccggcaatgtgcccggcggccagggggtaccaccaccgccacctccatccgccctgtggtccgttgccgctcccacgctcgccaatctgcctccgagtgcagcgagcgctgtgcccgtctccacttgtggctccctcagttcggcgcacttgatggccggcggagcaggtggcacaccaaccaatcgggccatctcccctggctctggcagccatgataccttggaatcagcggatgagaaccggcacatagactccgattatctggatgacgatgatgagcccaagttcaggcggaatcggaccaccttcagtccggagcagttggaggagctggagaaggagttcgacaagagtcattatccttgtgtgagcaccagggagcggttgtccagtcgcaccagcttgagcgaggcaagagttcaggtgagtcaggtgaaaacaaaggcttcactcaaaactttcaaaaagcaagattaaaagtggctagtaaagtagttacataccatttgatttaaattaatgagtaaatcaatacttttatatcagaaattagagttacctctttcaaagccaattaaccaaaacctcaaataactaatctttattaaatatcatttatttctaccctttccaggtgtggttctccaatcgccgggctaaatggcgtcgccaccaacgcatgaatctcctgaagcgtcagcgctccagtcccgccaatccgctgcactcgcagcagtcgaacgatgcaccggccagttcgcccacgcccagtaaccacagcagtgcctccacctccgctccagtggctcccgtgccgccacctcagcagccgttgcccctgtgcggtgaccactcgccacagggtccgccaccttcggtgctgttacacccactgcatggtcctccgggcggccaccatcaccatcatcctctgcacctacccacgcatccagctgccctccagctgctcagccactaccaccagcagcagcaacagcaacaacagcagcagcatcagcagcagcagcagcaacatcatcaacaacaacagcaactctcacccagtggatgcaatccggcggcgaatcacctctccatgggcggggagcgtagtgccttcaggagtctggtgagctcgccctcggcggctgccttcctgggattggccaggcaatatgccgtggctgcatcattaacggtcgccgaggagcagcgctccagattgcactactccgcaggtggtttggggagcggtggtgagggcacgggacccaataccaacaccactcaatctggcggctcaaccatgacggtggacaactcgtcatcggactcggatgaggagatcaacgtgcacgacgattccgatggtgaaattgagtcgtcggcggcaacggcggcaaaggtggctcgcctgtcatcctccgatgcgccggccacgttgcaattcctaaagcatgaccgctagatgggcgacatgggcgacaagggccacctggtctagatgggcggcggcaaagtctaattgaaaacctgagttgtgcgcgcctctgtgattgacagtggcaacaaaaacaaaagcagcaaaagcaacagcaactactgatgcaattgcaattgcatttgaaattgcaactggtggactgaaatacgagaagcgactacacacacagtgggcaaacaaatcgaaaaaccaaagttaaaatgctgctcacctacttggctgcggttcggggtcgctagaaaaaagaaaaaaaaaactaaataaaaatagaaaaaagtaaacagaaaaatgtagcagaaagcagcagcaacaacataatgggcggcttaagattagctgaaattgtaactaatacccgatacgaacacgcttgtcccacttgaaatgcacatgcccattgtataccctatagttatgcataattatactataatacttgttcattcgccggctgccgacttacctcatcaccatttaaggctatagcatatgcaatatctaactatatgtaactttaaactttaaaatagtcctaagccaaatctatttatgaatgcgtattgtttaaggatttgattcttgagttggttgcgtttgaactgatatttagtgcgtagactaagtgtttttggctcaaataaaagaaaaaaactaaaatggtcaaccgctgagtgagaaaccaataaaaagtgcaagaaataatgaagaatcgtttactttctttcggcaataaacaaacagaaatatatgaccaggaaatcggtttgtatagactcgctttggtttgacaacaaatacaatttatacgttcgatttcacgcataattatccattcaaacacactgggcaacaaacaaacacaccaaacacggccgaaaagcataaataagcatttaacaacactcgaaagcttcttaaaacgttattaaatattaatacaccgaacgaagacagaacaaaaagccaaacgaaatcgaaatcaaaaaaaaaaaaaaaaaaaaaaaaaatccaaatccaaaatacgcgcatagaaaacgcttaaatttcgaacgtaatggccaatatgtccaaatctggctgataacatcgacattttaattataaccaaatgaagccgcgcgcacaaacacagtggggacagactaaacgcgacgaggagatgagaatggatggtatggtttggtatcatatggtatcgtat

SEQ ID NO: 42629 - DNA, 2033 bp, DROSOPHILA
ccggtggcggaggggccacatccacatcacccacatctgtgcaaataccacccggctttggcggcggcggctccactggcggcattccgcacggtgcaggtggacccacggggagcacattgaacaccctgatgtcacagcatcgcctcctggaattctcacgtttcggtggactgcgtggctatgacattgcccagcacatgctaacccagcagggagctgtctccaagttgctaggctcgctgcgaccaccgggcttaattggtggctcaaagcccaaggtggccacgccgacggtcgtctccaagatcgaacagtacaagcgcgagaatccaacgatcttcgcctgggagatacgagaacgcctgatttcggagggtgtctgcactaatgccaccgctccatcggtgagcagcatcaatcgcatcctgcgcaatcgagccgccgagcgggtggccaccgagtttgctcgcaccgccgcctatggcctgtacccgccaccccctcatccgtacggtagcttcacctggcatccggccggcaatgtgcccggcggccagggggtaccaccaccgccacctccatccgccctgtggtccgttgccgctcccacgctcgccaatctgcctccgagtgcagcgagcgctgtgcccgtctccacttgtggctccctcagttcggcgcacttgatggccggcggagcaggtggcacaccaaccaatcgggccatctcccctggctctggcagccatgataccttggaatcagcggatgagaaccggcacatagactccgattatctggatgacgatgatgagcccaagttcaggcggaatcggaccaccttcagtccggagcagttggaggagctggagaaggagttcgacaagagtcattatccttgtgtgagcaccagggagcggttgtccagtcgcaccagcttgagcgaggcaagagttcaggtgtggttctccaatcgccgggctaaatggcgtcgccaccaacgcatgaatctcctgaagcgtcagcgctccagtcccgccaatccgctgcactcgcagcagtcgaacgatgcaccggccagttcgcccacgcccagtaaccacagcagtgcctccacctccgctccagtggctcccgtgccgccacctcagcagccgttgcccctgtgcggtgaccactcgccacagggtccgccaccttcggtgctgttacacccactgcatggtcctccgggcggccaccatcaccatcatcctctgcacctacccacgcatccagctgccctccagctgctcagccactaccaccagcagcagcaacagcaacaacagcagcagcatcagcagcagcagcagcaacatcatcaacaacaacagcaactctcacccagtggatgcaatccggcggcgaatcacctctccatgggcggggagcgtagtgccttcaggagtctggtgagctcgccctcggcggctgccttcctgggattggccaggcaatatgccgtggctgcatcattaacggtcgccgaggagcagcgctccagattgcactactccgcaggtggtttggggagcggtggtgagggcacgggacccaataccaacaccactcaatctggcggctcaaccatgacggtggacaactcgtcatcggactcggatgaggagatcaacgtgcacgacgattccgatggtgaaattgagtcgtcggcggcaacggcggcaaaggtggctcgcctgtcatcctccgatgcgccggccacgttgcaattcctaaagcatgaccgctagatgggcgacatgggcgacaagggccacctggtctagatgggcggcggcaaagtctaattgaaaacctgagttgtgcgcgcctctgtgattgacagtggcaacaaaaacaaaagcagcaaaagcaacagcaactactgatgcaattgcaattgcatttgaaattgcaactggtggactgaaatacgagaagcgactacacacacagtgggcaaacaaatcgaaaaaccaaagttaaaa

SEQ ID NO: 42630 - protein, 554 aa, DROSOPHILA
MSQHRLLEFSRFGGLRGYDIAQHMLTQQGAVSKLLGSLRPPGLIGGSKPKVATPTVVSKIEQYKRENPTIFAWEIRERLISEGVCTNATAPSVSSINRILRNRAAERVATEFARTAAYGLYPPPPHPYGSFTWHPAGNVPGGQGVPPPPPPSALWSVAAPTLANLPPSAASAVPVSTCGSLSSAHLMAGGAGGTPTNRAISPGSGSHDTLESADENRHIDSDYLDDDDEPKFRRNRTTFSPEQLEELEKEFDKSHYPCVSTRERLSSRTSLSEARVQVWFSNRRAKWRRHQRMNLLKRQRSSPANPLHSQQSNDAPASSPTPSNHSSASTSAPVAPVPPPQQPLPLCGDHSPQGPPPSVLLHPLHGPPGGHHHHHPLHLPTHPAALQLLSHYHQQQQQQQQQQHQQQQQQHHQQQQQLSPSGCNPAANHLSMGGERSAFRSLVSSPSAAAFLGLARQYAVAASLTVAEEQRSRLHYSAGGLGSGGEGTGPNTNTTQSGGSTMTVDNSSSDSDEEINVHDDSDGEIESSAATAAKVARLSSSDAPATLQFLKHDR

SEQ ID NO: 42631 - DNA, 4283 bp, DROSOPHILA
ttttcagctccttgaagcactgactgtgattttttggggacaacctgctggcaggagcaacatgttgcagcgacgcacataattaaaactagagaacgcagaccataaagcacatagagcacttgaatttataccccaaatacccctacatatcctccggattccagcaacagctgatggcgatatgcgtcggagtgcacaactcccaccatttataactgcaaattgctttggcagacatgccagccatatgtattgtatttatagcagttgtaaccgagctttgccttcggaattggctcgaaagtaacccctgaagacgggagaggacgttctgcaaggaagggaggaaactcacatgcacgatgtggggccccacattaaacccctgaattggataaatccgcccacgtgcgtgtgttcctgtggctctctaattcgcatgcatttatgcgtgaccatgaacaaggagcaatcccccaggatcccaggatccagcatgtccctttccctttccccttccaactgcactcgtcctggctgtgaccactcttcactggcaaattgtcaagtccttgttgtcctcagcctcgtctggcttaacttttgttgtcctgcgggcttggttttttccacatggtcggctcctctgttctgaatttataattccatttgtggttttaatttcgtaaatgtgagattaattttattcaatttgcgtgtccagagttagacggctgggtgaaatcctggcagcttgtgtttaggtctggggtaaacgcttcattgactgtcaattgttggcaattgaagtggcaagaaagaaagtgagaatttggcaaacgaaatgttgccaatgcaataaaggttttaaaagtatggggatttttgagtctcattctttttgcgtatccataaacacctttaagtatagcttttaatactttaatatttatagtatagggtaaggaaagccccacaccacagtatagattgccccttaaaagtactttttgtttagtttttcccttcccaagtcttccgtattatccattacactctccagaaatcgttcctcttgtggatccagcctcgttatgaagatgtcccgcgtggctctgaattggccacaattatacaaatgctcgttctccaggcgcagaaagttccagaaaaatcgtctcgctatctcactgaaacaaatcaacgatttgccattgtagggtgctatcaattcctgatggaccagggcaaactccaatatccaaacgcaccgaagcagggtattctccacgatcacaaagtagtaaaaccactgtggcataaagatgatgtcattaatcactttcgaacagattatggtttatggttttaccctgggatagaccaagttgtcgcgtagaaatttgttctcgccattccaaactcggaataaaccaaagtccatcagcaaatcccagaacacagtataaattgacgaaacaatgcaaattgttatataagcccaagtccaggggctctcaaagagatcggtataatgagctaagggggttttaatttgattatgagatcattacgagaaatcaaatagatttaagctaccaattgtttccatttgtattgttgaaaagacgacttccgctatgaataaaaagtactttagcgcattgatcaaataatccgtggactttgacccactgtccctaaatcttcgaaggctttgagcgaatctaaaccacgcaggcaaacatcgaatcacagccaccgcgtaatcgggctcaaactcgaaggcatcgctccgatccaggaagtatcgcacatagaagcggactaggtaatagtgatccacgatggtgaccaccagtgatgtccactgatccgccacccaaaagtccgcgaagttcacaaagaagaagggggacaaaaggatgcgacccatgacggtcaatagccagatcctgcctgagtagaaaagaatgcgaaaggggttcaggaacagcactactacaaaggccacctggaccagcggtatgtagatcggatcctcgatgaagaactccttgtggagtaagtacagcagaatgctcagagtgcacatgtatccaaagaaactggatatttccaaggctctcatggctcctatggcattcctccgctctacttcgaagatcaaaacttggttcacgcccaccgtctcgtaaactttaatatttattgctagacagaagccaaaagtcacacccgaaatgggacccctaaacagactgacaaaggtgtagcgaaactctggactcgtatcaaccgcaaaatctacagaaaaagaaagaaaacataatctgcgaaaagaatcaaatacatcaaatccactcacaagatataaaacataaaatagcggagaccaaaaatagacccagaaagagcccggcgctgaaaacatgaaccggcggagttgggtggcccaatggcggcactcgaagcttggccatcgcctcagatctatccccgttggccaagtaatccgtgtacatgttctccgtagtcgatatcatccggtccaattgcagggttatggccaaagtggactttagaacgtatttctcgtaccaggcaaatccagcctctgatttaagattcttgtcgtacttcttgcagatcttgcgaaacgcagtcatgttcaacgtttgataattctgcaacattatcaggctgagatggggaactatttacaattacaagtaatcgcattagagaaacataatgtttcgtctaaaccaggatatatattattacgttgggagcccatacctaagatagaactcgctcatagccagccgaagtttcttgatgggcggaaacttgcgcttaccctccggctgacgactccaggacgaagctgagcccctggaagctgtcgatccccgaggatcctgctgtgcacgacgacggtctagttggtaattgagggtggccagcttgcgatgggcctccgcctgcttgtgggcaaagaagtaattcactttggtcaattctactctgcaggagttgaagaagagttcctcgaagtttctgtagtaaccgatagctacgtcattacttggccgacttccactgggtgctttttccacagcatttcgtatcatttgcttcagttccttgaaaagttagctttatagtttagtctggattttggattggtatatataatcagagttacattgtagttcatgtactggtaccgccattctggtaccataagattatcaagagtcttgccaaacttcatttttacaggacttgattttgttcacttctaatgtgagctttacttatttgacaagtaatacaagtgcgattattatatgatgatggatactcattactttcataacagaaagcttaatccaaaattagccgaaggcattatatatccagccgcccttgaaatctgtaattgagaattcatccctttcagaacgccgacaaaatttgtttgcttggtcctgtaaaaattgttcactgtccggggaaacccacgcaaattttgacatgcgtttcccattcccttttttcaacagttgacaatttcgcttttgttttcgcaaacgctgtccgcagaacaacaactctcatccctacaatttcccggcttttcatgttcgtattttttttcaagttttccgccttttttgaagtgactgcgttcgggtgtattattataaataaagggaaagtccaggaaaatgagttgactaagggttggcctcagttttgcaactctttaagctcgctgactctccaatggagagccacaattcgattccggaggcttgccattagtcataagaaaagaaaattgggaaaagtgggaaaatgtcgtctacaggcatcccaagatgagtagtagtgggcggccaaaaaggactcccatctcacctcaatcgtcatcatcaaagccggcattcatcttcccctctgagccacaatgtgaaaaatgtgaaacaattgcaacgatgattactttttccaacagttttgccccctcgctgtttttgttcggtcgtaaaggaaaattgaattgccaatgggcggggcatcaagtttgtcctgccctccagggaccatttctgggggggattggacggagggcaggacacggacaggcgatgatgaaaacaggtgaactccataattatatgctaaatactcgggtaattaactcccccgggaacattaactatttgaagaacttgattaagcagatgagtacggctcgtgaaattccc

SEQ ID NO: 42632 - DNA, 1800 bp, DROSOPHILA
atgaagtttggcaagactcttgataatcttatggtaccagaatggcggtaccagtacatgaactacaatgaactgaagcaaatgatacgaaatgctgtggaaaaagcacccagtggaagtcggccaagtaatgacgtagctatcggttactacagaaacttcgaggaactcttcttcaactcctgcagagtagaattgaccaaagtgaattacttctttgcccacaagcaggcggaggcccatcgcaagctggccaccctcaattaccaactagaccgtcgtcgtgcacagcaggatcctcggggatcgacagcttccaggggctcagcttcgtcctggagtcgtcagccggagggtaagcgcaagtttccgcccatcaagaaacttcggctggctatgagcgagttctatcttagcctgataatgttgcagaattatcaaacgttgaacatgactgcgtttcgcaagatctgcaagaagtacgacaagaatcttaaatcagaggctggatttgcctggtacgagaaatacgttctaaagtccactttggccataaccctgcaattggaccggatgatatcgactacggagaacatgtacacggattacttggccaacggggatagatctgaggcgatggccaagcttcgagtgccgccattgggccacccaactccgccggttcatgttttcagcgccgggctctttctgggtctatttttggtctccgctattttatgttttatatcttattttgcggttgatacgagtccagagtttcgctacacctttgtcagtctgtttaggggtcccatttcgggtgtgacttttggcttctgtctagcaataaatattaaagtttacgagacggtgggcgtgaaccaagttttgatcttcgaagtagagcggaggaatgccataggagccatgagagccttggaaatatccagtttctttggatacatgtgcactctgagcattctgctgtacttactccacaaggagttcttcatcgaggatccgatctacataccgctggtccaggtggcctttgtagtagtgctgttcctgaacccctttcgcattcttttctactcaggcaggatctggctattgaccgtcatgggtcgcatccttttgtcccccttcttctttgtgaacttcgcggacttttgggtggcggatcagtggacatcactggtggtcaccatcgtggatcactattacctagtccgcttctatgtgcgatacttcctggatcggagcgatgccttcgagtttgagcccgattacgcggtggctgtgattcgatgtttgcctgcgtggtttagattcgctcaaagccttcgaagatttagggacagtgggtcaaagtccacggattatttgatcaatgcgctaaagtactttttattcatagcggaagtcgtcttttcaacaatacaaatggaaacaattggtagcttaaatctatttgatttctcgtggttttactactttgtgatcgtggagaataccctgcttcggtgcgtttggatattggagtttgccctggtccatcaggaattgatagcaccctacaatggcaaatcgttgatttgtttcagtgagatagcgagacgatttttctggaactttctgcgcctggagaacgagcatttgtataattgtggccaattcagagccacgcgggacatcttcataacgaggctggatccacaagaggaacgatttctggagagtgtaatggataatacggaagacttgggaagggaaaaactaaacaaaaagtacttttaa

SEQ ID NO: 42633 - protein, 599 aa, DROSOPHILA
MKFGKTLDNLMVPEWRYQYMNYNELKQMIRNAVEKAPSGSRPSNDVAIGYYRNFEELFFNSCRVELTKVNYFFAHKQAEAHRKLATLNYQLDRRRAQQDPRGSTASRGSASSWSRQPEGKRKFPPIKKLRLAMSEFYLSLIMLQNYQTLNMTAFRKICKKYDKNLKSEAGFAWYEKYVLKSTLAITLQLDRMISTTENMYTDYLANGDRSEAMAKLRVPPLGHPTPPVHVFSAGLFLGLFLVSAILCFISYFAVDTSPEFRYTFVSLFRGPISGVTFGFCLAINIKVYETVGVNQVLIFEVERRNAIGAMRALEISSFFGYMCTLSILLYLLHKEFFIEDPIYIPLVQVAFVVVLFLNPFRILFYSGRIWLLTVMGRILLSPFFFVNFADFWVADQWTSLVVTIVDHYYLVRFYVRYFLDRSDAFEFEPDYAVAVIRCLPAWFRFAQSLRRFRDSGSKSTDYLINALKYFLFIAEVVFSTIQMETIGSLNLFDFSWFYYFVIVENTLLRCVWILEFALVHQELIAPYNGKSLICFSEIARRFFWNFLRLENEHLYNCGQFRATRDIFITRLDPQEERFLESVMDNTEDLGREKLNKKYF

SEQ ID NO: 42634 - DNA, 5415 bp, DROSOPHILA
gcaacttgaagcgcttcggcgacgtggtatcccaatacggacccaagttccaactggaccacacattcaccctgattatccggctgcgccacaatgtgatcaagacggcaatccgctccatcggactatcgtactcacgcatctcgccgcaagacattgccaagcggctaatgctagactccgcggaggatgccgagtttattgtatcgaaggctatacgggacggcgtgattgaggctacgttggacccagcccagaatttcatgcgcagcaaggaaagtacggacatctacagcacccgggaaccgcagctggcctttcacgagcgcatctcgttctgcctgaacctgcacaaccagagcgttaaggccatgcgctatcccccaaagtcctacggcaaggatttggagagcgccgaggagagacgcgagcgggagcagcaggaccttgagctggccaaggagatggccgaggatgatgaggatggtttctaagcggctgattctgcaaattaatttgtgcttgcattcatttttatagaaatataatccgcaattaaataagttacaataatttcggaacttttttaattaggtattggaaatcaaaaatagttcagaactgatctttctttttattcaagcaaaaagttgtatgttgttgttggtagacaatcaaaaatttcaattcggttagaaatggaaaaacattttaaaaatgtcactcttctggcagccttggcgcgttaatttaaaacgaagtctggcaacatagattcatattcttctttagatcttttccctccaaagctattttattaaagatcccttaagtacattggcaggacttttctctgattgatagaggtaatttatgatatgtaaattatagatggaaaagatgcaaatattatttcaattactttaaacacgaccttccacaaaaagcacactttttctgacgaaggttttggtcggcagtattaacggtcacactggcgcaaacaacacaaacagcagccacggtcacacaaatcaaagtggaaaaaatttttagacaaaaaggtgcacacaatgcaaattaattaaaggccgtgcgtattaaatgccctaatacgcgatcctacgtactgtattttgctgccgaaaagtgcaacgcgcgcctatcggggagtttcgcggaaattgctgggttttttgtgacagcggcgagtagtctcctccgaataacagcggccgaacagcgagcgttttgcgaagcagcgagtgcctggccaatgtggtgcagccccccgccacccgccgcccgcgcaccccctaccccgctaacgcgcaaaatatacgcgactagttgtagttgtgggcagcagagcagcaggaaaagcagcagcagccgatcagctctgcctttgtgagcggattagtggcgaagaagccagcgaaaagccaattaacagtgccccgggaagctgggccggtgtccacgagcggatctcagccagccttcgacaattccggctgtgatgcagcagctgctgctgccacctaacgagattctggacgccttttgcacccaccacacgtaactagagcactcacactgacgcgagcacacacacacactcacacacattcggagacgggccaactggcgaacgggcacactattaggtggccattgatgcagtgcagccgcttgcagggattcgggatcggtaggtgaaaaggactgggacaagcgtggagatgatttgcaaacaggacgttctgcagtggtttgagaaactcgagagctacaatcggatcgaaacgatgtacgccctgctcaccgcctgcctgccattcgagctgcgatttttgggcacgctcctcgaggagcagggccgttgcgactcggagacgctgcgaggcatggagctgcgggcgaataacccgcacgagctggccgccgacatggtgaactgccagaagggcgatcccaccgaccggaagatccggcgcaagatggccctgtatctggcgcttatccgtgcctgcaatcggaactgcgtcagtgagatctaccgcacgctggaatgctggggcgagtgcgatttcagttgcattaatgatcaggacacgctgttggagctgctgctggtctacacgatggcagccatccacccggtgttctccatggaggagcaaaagaagattttcggcattctggctaagatcaaggagaacaagttggtagcagagcgattcgcgcctcaaatgcaaagacagacacagacgccagtgctccagcatcctcacccgccgtccccacatgacctggtcattcagcagcagccaccacacgtgatccaccaaataccaggaccgcagcaggcgcccccgcacccgcaacatcctcaaatggtgcaggtactgcagacgccgcagggcaacatacccatgatctttccccagcactttcaaaaggtaaatctttaaatagaaaaccactaaaagtttattaacttaatctgttcatctacagcttctgcccagctctgatggaacgcaccagatcagtgtcgatggcatgccgcacctgatgcagcctaacatcaccattccagcggacactagtgccatcatcagtcaccagaacacgggatggacgatgcgtcactacgtgccacaaccgccccaccaacagcccgctctgcagcaacagcagccgcagagtctggaccatcaagtgccacctgccagctcgccgatgctgagtcagcaatcctcgccatcgagtagtcgcaccacgagtcctcagcgggaccgctcccttattaacgttccactgcaggcgcagcagcaaccacatcagcagcagcagatgaggggcatgtcccagcgaatggcggatcagaagaacacgcggcgtccctcggcggagactaccccgccgccaacctcaattggcggcgagcagcagcacgatgtaattattaaacaactaaataatttgtttatttatttgaagcaaactcaagatttaaatttaaaggaaattaactaatatcagcattagcatccattgtttagctcggcaatatttagtagtctccatataatcaccataatcatatcgcttatacgacaaataacttacctttacagagtgtcaacgaaggcggaagcagtaattccagcggaaccagtctgcacagactcatccgcaacggttttccgcgtctaggacacaatcatcgagtcaaggcaaataccttcataccacagcaccagcaacaacagcagcagcatcactttcagaaccccaactacaacatgaacgttatgatgcagagtatgaatataaacgacgatggcagtggatcgatgatgaattccatgaactccaccaaaagtgcagctaccacgggtagtgaatcgggcagctcgaatggatcctgtggtgacctgtcgccctctgagacgccaacgcccacgcagctctcactgccactgcacaattcggtggatgcgggaatgggcatgatcacgacagtactgcccaccggtctgggaaactatcagccgaagccacaccacttcagctacaagcagcagcagcagcaaatgaatctgcagcagcggctaaacggacgcaatgggatggataagacctatcagcaggtttacacaacgggcacgccaagcatcgtcagcgatgcacagaccatcagcagcgccagcctgcagcagcagcagccccagacccttctcatcagccagtctccggtgagcacacccacgacaacggtgctcctgcagccgcaacaaccgccgcccacaacctacaacacaagctatccatatcaccagcgaggacccccgccgccacagcagacgatattccaagcgcatagtgcgccgcctccccagacggtgcgtggtggcttccgttatccgatgggtccgccacacaacggtgagcttatttacccgaccttccacaccagcctggccttcctgccaatgacagcgggaggaactcctaccgcggtaacgcctgcccagctccaaagcacagcggccgtggtcagtacgaacgcggtgagcgtgcagacggtgccgacgccacagcagcagcaagtccccagcacgacgccgtacagtgccctcactgtctgccccatcacgggagcgggtggtggcggaaccgcgccgaaagtgatctcctgctacaactgtggatcgcagacgcacagcgggcgagaatgccaggaggcgtcgatggaggatgtgactcgaagcgctagctacaaactggactactccgagacgagcatggactcaagcgccacgggcgatcaccacaaggacgtgggcagtgtgcagatcaactcaacggcgactgcggggacggtgaccagtacggtgaaataatacggagggaccgtatattaacgtacatatatggaaatattattactgctatattaatgattatgcataatccttacctacttatacgaattaccatttattatgattgtgtagtgcggaaatcaaatttctcgcctttgccacgtctcttagttccgtaagcctctcaattcgcgttaattcaattcgaggatcggcaggcggctgcggttgcggctaagtcttgacaacccttatccgtaaataagaatgatttaggtgcgccctgccatgccctgccctgccacgcccctcccacacacatagtcgataacgaattttagtcatatgccactcttaatatttctaacgttaagttgaatgtacaacagcaataagtaataatcctaatccgcgttctgcgctccgcgtttccgtaaactcactcaacgggcagatatgttacaaatgccacgatcgaattaagctaaagaaccattacgtaagccattacgcgaccacgacggggggcgtaaccataccgtaacctaacgtaacgaaacggaatgaaacgaaactgggagaggggattggagttgcccaggaaaacagaacacacgtagcatacggattaactagcaaatatattaaaattgattatgtgtataaacaaacgagtgtagcagcacagtgtgcatagttaaccgacttctgattccaaccgagccctctgatctactaacaccctgtactctagttactccgccatctatttatttgctgctcctttgtttaaacatgtatttttagcaatgttttttttgtactttatataaataccaacatacttatatacacacatatatatatatatattacattatatatatatatattattttaaagcaaacaatcgtatatgatacactcttatgtggatagggcgtacgttactgctaagcactctgtctaatgattattttatgtactcacaacttgaaccccgatgggcaactgtata

SEQ ID NO: 42635 - DNA, 3178 bp, DROSOPHILA
caaacaacacaaacagcagccacggtcacacaaatcaaagtggaaaaaatttttagacaaaaaggtgcacacaatgcaaattaattaaaggccgtgcgtattaaatgccctaatacgcgatcctacgtactgtattttgctgccgaaaagtgcaacgcgcgcctatcggggagtttcgcggaaattgctgggttttttgtgacagcggcgagtagtctcctccgaataacagcggccgaacagcgagcgttttgcgaagcagcgagtgcctggccaatgtggtgcagccccccgccacccgccgcccgcgcaccccctaccccgctaacgcgcaaaatatacgcgactagttgtagttgtgggcagcagagcagcaggaaaagcagcagcagccgatcagctctgcctttgtgagcggattagtggcgaagaagccagcgaaaagccaattaacagtgccccgggaagctgggccggtgtccacgagcggatctcagccagccttcgacaattccggctgtgatgcagcagctgctgctgccacctaacgagattctggacgccttttgcacccaccacacgtaactagagcactcacactgacgcgagcacacacacacactcacacacattcggagacgggccaactggcgaacgggcacactattaggtggccattgatgcagtgcagccgcttgcagggattcgggatcggtaggtgaaaaggactgggacaagcgtggagatgatttgcaaacaggacgttctgcagtggtttgagaaactcgagagctacaatcggatcgaaacgatgtacgccctgctcaccgcctgcctgccattcgagctgcgatttttgggcacgctcctcgaggagcagggccgttgcgactcggagacgctgcgaggcatggagctgcgggcgaataacccgcacgagctggccgccgacatggtgaactgccagaagggcgatcccaccgaccggaagatccggcgcaagatggccctgtatctggcgcttatccgtgcctgcaatcggaactgcgtcagtgagatctaccgcacgctggaatgctggggcgagtgcgatttcagttgcattaatgatcaggacacgctgttggagctgctgctggtctacacgatggcagccatccacccggtgttctccatggaggagcaaaagaagattttcggcattctggctaagatcaaggagaacaagttggtagcagagcgattcgcgcctcaaatgcaaagacagacacagacgccagtgctccagcatcctcacccgccgtccccacatgacctggtcattcagcagcagccaccacacgtgatccaccaaataccaggaccgcagcaggcgcccccgcacccgcaacatcctcaaatggtgcaggtactgcagacgccgcagggcaacatacccatgatctttccccagcactttcaaaagcttctgcccagctctgatggaacgcaccagatcagtgtcgatggcatgccgcacctgatgcagcctaacatcaccattccagcggacactagtgccatcatcagtcaccagaacacgggatggacgatgcgtcactacgtgccacaaccgccccaccaacagcccgctctgcagcaacagcagccgcagagtctggaccatcaagtgccacctgccagctcgccgatgctgagtcagcaatcctcgccatcgagtagtcgcaccacgagtcctcagcgggaccgctcccttattaacgttccactgcaggcgcagcagcaaccacatcagcagcagcagatgaggggcatgtcccagcgaatggcggatcagaagaacacgcggcgtccctcggcggagactaccccgccgccaacctcaattggcggcgagcagcagcacgatagtgtcaacgaaggcggaagcagtaattccagcggaaccagtctgcacagactcatccgcaacggttttccgcgtctaggacacaatcatcgagtcaaggcaaataccttcataccacagcaccagcaacaacagcagcagcatcactttcagaaccccaactacaacatgaacgttatgatgcagagtatgaatataaacgacgatggcagtggatcgatgatgaattccatgaactccaccaaaagtgcagctaccacgggtagtgaatcgggcagctcgaatggatcctgtggtgacctgtcgccctctgagacgccaacgcccacgcagctctcactgccactgcacaattcggtggatgcgggaatgggcatgatcacgacagtactgcccaccggtctgggaaactatcagccgaagccacaccacttcagctacaagcagcagcagcagcaaatgaatctgcagcagcggctaaacggacgcaatgggatggataagacctatcagcaggtttacacaacgggcacgccaagcatcgtcagcgatgcacagaccatcagcagcgccagcctgcagcagcagcagccccagacccttctcatcagccagtctccggtgagcacacccacgacaacggtgctcctgcagccgcaacaaccgccgcccacaacctacaacacaagctatccatatcaccagcgaggacccccgccgccacagcagacgatattccaagcgcatagtgcgccgcctccccagacggtgcgtggtggcttccgttatccgatgggtccgccacacaacggtgagcttatttacccgaccttccacaccagcctggccttcctgccaatgacagcgggaggaactcctaccgcggtaacgcctgcccagctccaaagcacagcggccgtggtcagtacgaacgcggtgagcgtgcagacggtgccgacgccacagcagcagcaagtccccagcacgacgccgtacagtgccctcactgtctgccccatcacgggagcgggtggtggcggaaccgcgccgaaagtgatctcctgctacaactgtggatcgcagacgcacagcgggcgagaatgccaggaggcgtcgatggaggatgtgactcgaagcgctagctacaaactggactactccgagacgagcatggactcaagcgccacgggcgatcaccacaaggacgtgggcagtgtgcagatcaactcaacggcgactgcggggacggtgaccagtacggtgaaataa

SEQ ID NO: 42636 - protein, 810 aa, DROSOPHILA
MICKQDVLQWFEKLESYNRIETMYALLTACLPFELRFLGTLLEEQGRCDSETLRGMELRANNPHELAADMVNCQKGDPTDRKIRRKMALYLALIRACNRNCVSEIYRTLECWGECDFSCINDQDTLLELLLVYTMAAIHPVFSMEEQKKIFGILAKIKENKLVAERFAPQMQRQTQTPVLQHPHPPSPHDLVIQQQPPHVIHQIPGPQQAPPHPQHPQMVQVLQTPQGNIPMIFPQHFQKLLPSSDGTHQISVDGMPHLMQPNITIPADTSAIISHQNTGWTMRHYVPQPPHQQPALQQQQPQSLDHQVPPASSPMLSQQSSPSSSRTTSPQRDRSLINVPLQAQQQPHQQQQMRGMSQRMADQKNTRRPSAETTPPPTSIGGEQQHDSVNEGGSSNSSGTSLHRLIRNGFPRLGHNHRVKANTFIPQHQQQQQQHHFQNPNYNMNVMMQSMNINDDGSGSMMNSMNSTKSAATTGSESGSSNGSCGDLSPSETPTPTQLSLPLHNSVDAGMGMITTVLPTGLGNYQPKPHHFSYKQQQQQMNLQQRLNGRNGMDKTYQQVYTTGTPSIVSDAQTISSASLQQQQPQTLLISQSPVSTPTTTVLLQPQQPPPTTYNTSYPYHQRGPPPPQQTIFQAHSAPPPQTVRGGFRYPMGPPHNGELIYPTFHTSLAFLPMTAGGTPTAVTPAQLQSTAAVVSTNAVSVQTVPTPQQQQVPSTTPYSALTVCPITGAGGGGTAPKVISCYNCGSQTHSGRECQEASMEDVTRSASYKLDYSETSMDSSATGDHHKDVGSVQINSTATAGTVTSTVK

SEQ ID NO: 42637 - DNA, 5403 bp, DROSOPHILA
tgtaaagtcagcagacgaactgcaaggtaatgaaaatagaagcaaatgatttacatgaaatacacactcttctgagtttgctgctaatgcgtaggcatgacaaacaattattatatttcattgaaataataaaaacaaattgtttctaaaattcgagtaacaaacacaaagctacaagtcgaactgttttactcagctcctgcactttgcctttttatgttttcctttgatcttcgacattacctctttccaacaggtggccatttaagagagcccctcgtgctctttgatcggattgctgaaactcaccctcttttcaatgaccaagtcttctctaggctttaaaagactgctgtacagtgggtgctgtatagcgcgaatggaatatttaatattacaactttaaactttaaagatcatatccattattcatgggggagtacatttaaaaaaactacaatttaaattgaaactttgtaatatcgcatatattactttacttttaaaacttacgaactttaaattcacacagaaagggtaccactgtacttccacgtctcgagtgcaactcggatttgggcaatacgacaagaaaccgaaagaccgaggatccctcaagcgtgtccgtctttcagtaacggcccagagtcatcatagccgtagttatcgtgttcgtcttcagttgagcggtcgcttttatcgggtgcggatatcatatagtaacatgtaggagtattaccaaattcagacagttgcctattgccacatctcggcaagtcccctttaaagaactaataagtgcaggcaaaaggtgatatgaattagtgaccgagtgcagttaggttttagaaataacagtgtagtggattattaccccactaaaacaaatgaaatccgctgcgatcgccactcgatgggtgttcgttgatgcatagcgaagttggagtctttgccaagagctcgaagtgaaataaaagaaacccccaagagggccggaacaatgctcaaagccacgaggaagcaagcggatccgtacaaatcgaagctgaaagttagtgccagccacagtggaccgcatccactgcccgtcgaggtgacggcggcagaggaggagcaggccgccacttttggccagacatccccccagaagctcagcctgaagggcagccaactgggcggcagcattttgattggcaactacaatgtgagttgactccactccggctgtcggtatccgacatccggcttccggtactccatatccggctggcatgcctgtacatcttccccaatcgccgttttctcttttcgtccgcagtatttgacccagctggaggtatgcgaaaacgaaatggaggtcttggatctcagttcgctcgctcaactggagacgctgaagtgcagccggaacaagctgatggaactgatcataaatggcaccaatttgcagacacttgtcgccgaccataattgtaaggggttcttattgaatgtattccacattctgcatttaaatcttaaataaaaactttatctgtggcgcctacgtctctataatctattgcttaatcttaatctttaagcttatattgtagaagaagtagcgtttatacggacggacggaaattgatcctgaactttatagggtctattattctattaaactctcatactctatgcgtaatgggtagaattaaaatgaataggattctaaaacagtatcacttctattactcttcaataaattccagacctgcacaacatatccacaacgaacacgcatccagttccgctgaagttgcagcgcattgacatctctcacaataacttcagtgagctccccaactgggtcggagcatgtgcctccttgaccgccataaatgcttcacacaatcgccttaacaacgtggcagtactgttacgcaactacaggataactgagctggtttccttagacctggcatacaacgatctgaagcaactggaccaatttccggagggcttttcaagcatccggagtctgcagttgcaaagcaatgagctaccgagtcttccggacaacttttttgccgtgacccacgctcgcctggaaacgctaaatgtctcctgcaacaaactgtccaccctgccacgctacgaacagaataaccatgctgcgctggttaatttatccctggcggggaatcacctgaatgatagcatctttgagcccttgcacaatgccgccaagttgagagttctccatctggcctacaatcgcatcggggtcctgcccgccgcctgtgtccgcaactggccggaactggagatcctagttttatctggtaatatgctgcaacaactgcccgaggaggtggccactttaggtcagctcagggtgctacgctgctgcaacaatctgctcctctgcacgccgcaacttgcgaagttggccatgctgaaggtccttgatctctcgcacaatcatctggatcgcgtcaatctgctagcattggttccatcaaggaatctaaagtacctggatctatcgggaaacttgcagttgcaggtaagatatgagaaactaaacccatacacttatggtttcaaatggcacggttgttattgatcaactaatgacattatactttaggtggacgagcagcagttcaaggtttgtcagagccagagccagcgccattggagcctagtcgatgtctccggaaacaatagagctgctttgcctactaccaagatcagacaggtgagtgcccaacggaatcagaacaagaccagtgggccttggaccatgggatttgcggagactcctggctctggtgattgccggaagctttcagtttaccaactaagggcagcaaactacgggggatctgatgaggctctgtacgggatgttcgaggcattggaggggcgcggccgggctgcccaggagatgtctcatttggtgcccgatctgatgaagcaggagcagatggtcaaggactcggcggtcagggattacatgaagtttaccctgctggcggcgcagcaacaatgtggtagtgtgcggagtgccgccttattccatctgaccaggacacgggctccttccaaagtaagaccgctgaagagcaagcgatacgtcctacgcatggcaagcactggaggtctggacgcctacctgatacgacgcacctcccagttgcgtcttaccaagccggatgtcattcaaaaggatcagattcattccatgccagatccacatgtgttagaggtaagtttctaccaaaccaaatgtttagtccaatcaaattgaatgcggttccttgttgaagctcattctcagcaacgacgatgagtacttggtggtgggcaatgctcagctctggtcagtgatggatattgatcgtgcagcccgagagatccgaaaggaggagaattccctgcttgcggccaagcgactggtggacattgctcaaagctttgctgcggcggagagtctcagtgtaattgtggttcgctttcgccacctcggtacggatgtggaccacctgatacgagagcttaaacaaagtgtgcgcaagaagccccagccggtttccttacctttgtccagtggatcagtttgcaagcgaacgtgctgcgaccggagcaatgcctgtcgccaccgagccattgaacaggagccgctggcaggacgatcctcgccaagtgggcaaagtgatcgggacttgctggccaaggataaggacgacgagttcgtactagcccatgcccgtgtcctgcaggaggagcaacagcttgagatgctggacgaaacagagtcggtatcagaatcagtgctttctgaggagcagttcaagtgctgggagtacatgctggagcagaacacccagctgctgttcgataaggagctaaacaccatctctaagtcttttactaaacaacgtaccgtacccaatgctatcatggcagctacagttctcccagaacgcaatgactttacctcgaatttgatgcggactgtcaccaacaagttcatctcgaccagcactcctcaattaccccaacccataacgacttctgtgcccctgggttcatatcatcaggtgaagcaagcgcctcctggacactttggcagtgccctctccttccagcaggcccacagctacggctataatctgtttgatgccaagccaaggcccaagtttcacggaggcacagtcaagcgatccgcaggaccaaattcagcctactttggatcccttcagcgcctgatgccctacaatttcgagtacgactttgccgttacccaggagagggagagaaacatcctggacgaagaggagcacgacgatgatgacttcaacgagcacgagagtagaatgcgaaaatactggggagtggccacgacggaactttagtttagggttgtctttcaccgcgttatttacaataatttcaaatgtaagaaaaccatcgttagataaatccattatccaaaactatggaaagtctttggctttagtgtatgtttttcaaaattttaaagaaaaaaaataaatctattcgttacttaaatcccactattacaaaccaacgtacctaaacccgttattaacgagcaatgttatcgataaaacctatttgccggtctatcgatttccctcacgtggtaaccaccgataggctattgcggttttgtatcaagtttggcaattgtttatttttgtttacctttaaatattttataaccatgcacctgccgcaacagagaccgcaccacgacatcgctgcgatgttcgcggaagcacaatcggatttcgtgcgggtcagcgctccaagtaaatcctaaaatacgattagccagtattctattgttaaatctgcaaatgtattttttagtggtgcgctatagtaagctggaatttcggcgtctagtacgactgaatggagtacaactcgcgtttacgcccatgatgatctcagactccattaacaacagcgaaaaggcccgccagaacgagttctccacgggtgcggatgaccagccgctgatcgctcagtttgcggccaaggatcctacggaattcgtcacctccgcccagctcatctacccatatgtcgatggcatcgatctaaattgcggatgtccacaaagctgggcaatggcgaaaggttacggttgcggaatgctgcgccagccggagctagtgcatcaagtggttcaggaggtgaggcgcacactgcccggggatttcagtgtctcggtgaagatgcgtctgctgggaggagaggagtccttgcagcgcactatcgatttagcccgtcagttggagagcgcgggcgtcacctttctaactcttcacggtcggacgccagcccaaaaacactctaaggacacgctagacatcccagccatgt

SEQ ID NO: 42638 - DNA, 2865 bp, DROSOPHILA
atgctcaaagccacgaggaagcaagcggatccgtacaaatcgaagctgaaagttagtgccagccacagtggaccgcatccactgcccgtcgaggtgacggcggcagaggaggagcaggccgccacttttggccagacatccccccagaagctcagcctgaagggcagccaactgggcggcagcattttgattggcaactacaattatttgacccagctggaggtatgcgaaaacgaaatggaggtcttggatctcagttcgctcgctcaactggagacgctgaagtgcagccggaacaagctgatggaactgatcataaatggcaccaatttgcagacacttgtcgccgaccataattacctgcacaacatatccacaacgaacacgcatccagttccgctgaagttgcagcgcattgacatctctcacaataacttcagtgagctccccaactgggtcggagcatgtgcctccttgaccgccataaatgcttcacacaatcgccttaacaacgtggcagtactgttacgcaactacaggataactgagctggtttccttagacctggcatacaacgatctgaagcaactggaccaatttccggagggcttttcaagcatccggagtctgcagttgcaaagcaatgagctaccgagtcttccggacaacttttttgccgtgacccacgctcgcctggaaacgctaaatgtctcctgcaacaaactgtccaccctgccacgctacgaacagaataaccatgctgcgctggttaatttatccctggcggggaatcacctgaatgatagcatctttgagcccttgcacaatgccgccaagttgagagttctccatctggcctacaatcgcatcggggtcctgcccgccgcctgtgtccgcaactggccggaactggagatcctagttttatctggtaatatgctgcaacaactgcccgaggaggtggccactttaggtcagctcagggtgctacgctgctgcaacaatctgctcctctgcacgccgcaacttgcgaagttggccatgctgaaggtccttgatctctcgcacaatcatctggatcgcgtcaatctgctagcattggttccatcaaggaatctaaagtacctggatctatcgggaaacttgcagttgcaggtggacgagcagcagttcaaggtttgtcagagccagagccagcgccattggagcctagtcgatgtctccggaaacaatagagctgctttgcctactaccaagatcagacaggtgagtgcccaacggaatcagaacaagaccagtgggccttggaccatgggatttgcggagactcctggctctggtgattgccggaagctttcagtttaccaactaagggcagcaaactacgggggatctgatgaggctctgtacgggatgttcgaggcattggaggggcgcggccgggctgcccaggagatgtctcatttggtgcccgatctgatgaagcaggagcagatggtcaaggactcggcggtcagggattacatgaagtttaccctgctggcggcgcagcaacaatgtggtagtgtgcggagtgccgccttattccatctgaccaggacacgggctccttccaaagtaagaccgctgaagagcaagcgatacgtcctacgcatggcaagcactggaggtctggacgcctacctgatacgacgcacctcccagttgcgtcttaccaagccggatgtcattcaaaaggatcagattcattccatgccagatccacatgtgttagagctcattctcagcaacgacgatgagtacttggtggtgggcaatgctcagctctggtcagtgatggatattgatcgtgcagcccgagagatccgaaaggaggagaattccctgcttgcggccaagcgactggtggacattgctcaaagctttgctgcggcggagagtctcagtgtaattgtggttcgctttcgccacctcggtacggatgtggaccacctgatacgagagcttaaacaaagtgtgcgcaagaagccccagccggtttccttacctttgtccagtggatcagtttgcaagcgaacgtgctgcgaccggagcaatgcctgtcgccaccgagccattgaacaggagccgctggcaggacgatcctcgccaagtgggcaaagtgatcgggacttgctggccaaggataaggacgacgagttcgtactagcccatgcccgtgtcctgcaggaggagcaacagcttgagatgctggacgaaacagagtcggtatcagaatcagtgctttctgaggagcagttcaagtgctgggagtacatgctggagcagaacacccagctgctgttcgataaggagctaaacaccatctctaagtcttttactaaacaacgtaccgtacccaatgctatcatggcagctacagttctcccagaacgcaatgactttacctcgaatttgatgcggactgtcaccaacaagttcatctcgaccagcactcctcaattaccccaacccataacgacttctgtgcccctgggttcatatcatcaggtgaagcaagcgcctcctggacactttggcagtgccctctccttccagcaggcccacagctacggctataatctgtttgatgccaagccaaggcccaagtttcacggaggcacagtcaagcgatccgcaggaccaaattcagcctactttggatcccttcagcgcctgatgccctacaatttcgagtacgactttgccgttacccaggagagggagagaaacatcctggacgaagaggagcacgacgatgatgacttcaacgagcacgagagtagaatgcgaaaatactggggagtggccacgacggaactttag

SEQ ID NO: 42639 - protein, 954 aa, DROSOPHILA
MLKATRKQADPYKSKLKVSASHSGPHPLPVEVTAAEEEQAATFGQTSPQKLSLKGSQLGGSILIGNYNYLTQLEVCENEMEVLDLSSLAQLETLKCSRNKLMELIINGTNLQTLVADHNYLHNISTTNTHPVPLKLQRIDISHNNFSELPNWVGACASLTAINASHNRLNNVAVLLRNYRITELVSLDLAYNDLKQLDQFPEGFSSIRSLQLQSNELPSLPDNFFAVTHARLETLNVSCNKLSTLPRYEQNNHAALVNLSLAGNHLNDSIFEPLHNAAKLRVLHLAYNRIGVLPAACVRNWPELEILVLSGNMLQQLPEEVATLGQLRVLRCCNNLLLCTPQLAKLAMLKVLDLSHNHLDRVNLLALVPSRNLKYLDLSGNLQLQVDEQQFKVCQSQSQRHWSLVDVSGNNRAALPTTKIRQVSAQRNQNKTSGPWTMGFAETPGSGDCRKLSVYQLRAANYGGSDEALYGMFEALEGRGRAAQEMSHLVPDLMKQEQMVKDSAVRDYMKFTLLAAQQQCGSVRSAALFHLTRTRAPSKVRPLKSKRYVLRMASTGGLDAYLIRRTSQLRLTKPDVIQKDQIHSMPDPHVLELILSNDDEYLVVGNAQLWSVMDIDRAAREIRKEENSLLAAKRLVDIAQSFAAAESLSVIVVRFRHLGTDVDHLIRELKQSVRKKPQPVSLPLSSGSVCKRTCCDRSNACRHRAIEQEPLAGRSSPSGQSDRDLLAKDKDDEFVLAHARVLQEEQQLEMLDETESVSESVLSEEQFKCWEYMLEQNTQLLFDKELNTISKSFTKQRTVPNAIMAATVLPERNDFTSNLMRTVTNKFISTSTPQLPQPITTSVPLGSYHQVKQAPPGHFGSALSFQQAHSYGYNLFDAKPRPKFHGGTVKRSAGPNSAYFGSLQRLMPYNFEYDFAVTQERERNILDEEEHDDDDFNEHESRMRKYWGVATTEL

SEQ ID NO: 42640 - DNA, 3298 bp, DROSOPHILA
gtgggcaaagtgatcgggacttgctggccaaggataaggacgacgagttcgtactagcccatgcccgtgtcctgcaggaggagcaacagcttgagatgctggacgaaacagagtcggtatcagaatcagtgctttctgaggagcagttcaagtgctgggagtacatgctggagcagaacacccagctgctgttcgataaggagctaaacaccatctctaagtcttttactaaacaacgtaccgtacccaatgctatcatggcagctacagttctcccagaacgcaatgactttacctcgaatttgatgcggactgtcaccaacaagttcatctcgaccagcactcctcaattaccccaacccataacgacttctgtgcccctgggttcatatcatcaggtgaagcaagcgcctcctggacactttggcagtgccctctccttccagcaggcccacagctacggctataatctgtttgatgccaagccaaggcccaagtttcacggaggcacagtcaagcgatccgcaggaccaaattcagcctactttggatcccttcagcgcctgatgccctacaatttcgagtacgactttgccgttacccaggagagggagagaaacatcctggacgaagaggagcacgacgatgatgacttcaacgagcacgagagtagaatgcgaaaatactggggagtggccacgacggaactttagtttagggttgtctttcaccgcgttatttacaataatttcaaatgtaagaaaaccatcgttagataaatccattatccaaaactatggaaagtctttggctttagtgtatgtttttcaaaattttaaagaaaaaaaataaatctattcgttacttaaatcccactattacaaaccaacgtacctaaacccgttattaacgagcaatgttatcgataaaacctatttgccggtctatcgatttccctcacgtggtaaccaccgataggctattgcggttttgtatcaagtttggcaattgtttatttttgtttacctttaaatattttataaccatgcacctgccgcaacagagaccgcaccacgacatcgctgcgatgttcgcggaagcacaatcggatttcgtgcgggtcagcgctccaagtaaatcctaaaatacgattagccagtattctattgttaaatctgcaaatgtattttttagtggtgcgctatagtaagctggaatttcggcgtctagtacgactgaatggagtacaactcgcgtttacgcccatgatgatctcagactccattaacaacagcgaaaaggcccgccagaacgagttctccacgggtgcggatgaccagccgctgatcgctcagtttgcggccaaggatcctacggaattcgtcacctccgcccagctcatctacccatatgtcgatggcatcgatctaaattgcggatgtccacaaagctgggcaatggcgaaaggttacggttgcggaatgctgcgccagccggagctagtgcatcaagtggttcaggaggtgaggcgcacactgcccggggatttcagtgtctcggtgaagatgcgtctgctgggaggagaggagtccttgcagcgcactatcgatttagcccgtcagttggagagcgcgggcgtcacctttctaactcttcacggtcggacgccagcccaaaaacactctaaggacacgctagacatcccagccatgtctcaggtgcgccaatccctgcagatccccctgatagtcaacggcaatgtggagagctatagggatgcttgcgatatgcatgaacagacgggagcagctggtgtaatggctgctcgaggcttgcttgctaatccggctctcttcaatagcaactatccagatggtaaaacaacgccactgtcctgtgtacaacagtggctagatatagcctctgctgccggggataacctgcttttccagtgctttcaccaccacctcacctttatgtatagcgctcaaatgaagcgagatcttcgagtgcaattcaacagtttgggttccaaagaacaggtcgtggacttcctgaaggagcactacaatctggaatatagtgaggttgaccctccatcggctgactacacggattgcacgtacacccacttcacaccgcccaagcacgcccggcacatcgccgccgagtcggatgagcaggcctggagttcgaaaagcgacggaaaattctttacggtattcagagcacaccagttgaccggaactggcggagaagatttggaactgggaggactctttggtgacgaggagtaaattgttttgtaaatagatctttagtttggtggggtatagattttgtacaagacaaataggttgatatctaatatatgtaaacattgtatagtgaagaaaaaatcggcgacaaagttttgtatattttatttcccaaaaaaaataatacttaggtacataaattatttcaaagataaaattattttaatttaaaaaaatcccctcatgttaataatggtaaagtggtactaatgttatcgatatgttgactaacgtatgtcacccctggcgagctactgcatccgataacttatatgcttaatcgatatcgagatatacagattgtatacttcctccccaaaagaaaacatcccggaaaaatgcgacgccgcgaactgcagaccatccagctgaagctgtccgatctcaaggagtacgagcaggctaagatggagcgcctgaggaaccgccaacaattgcttactccccggacgcctacacccccttccgacagcgaagtcctgccggcgacctccagcagcgttccagctgttctcctggccagcggcaagaacctggacgatgacgccgacaagtcagagcccacaaccaagcccagcacatcctccacctagggtctatacttgagcaagcaatgtaagttttcacatacaaatgtatattatcgtttacatgggataatcgtccgcctggctgttgttgttgttttgaaatcgaactgtctcaaaaccgtcgacaaggatttcgcgatcctcggtttgttgtcggtcccgaagccactgctcccgcactggcacatatcgccggagtcccggcaactttctccaacatcgccgcttgtaaagaacccaaaccagcgatacactgcacccaaacaggaagcagatcaggaatatgctaatgccgcggccgtgtgacgctgtggctggcaagtctgtgatttctggcgaaagatccttggcctccctgctgtgaaacgcctgtaggcggtcctcgtcgct

SEQ ID NO: 42641 - DNA, 1237 bp, DROSOPHILA
tttggcaattgtttatttttgtttacctttaaatattttataaccatgcacctgccgcaacagagaccgcaccacgacatcgctgcgatgttcgcggaagcacaatcggatttcgtgcgggtcagcgctccaatggtgcgctatagtaagctggaatttcggcgtctagtacgactgaatggagtacaactcgcgtttacgcccatgatgatctcagactccattaacaacagcgaaaaggcccgccagaacgagttctccacgggtgcggatgaccagccgctgatcgctcagtttgcggccaaggatcctacggaattcgtcacctccgcccagctcatctacccatatgtcgatggcatcgatctaaattgcggatgtccacaaagctgggcaatggcgaaaggttacggttgcggaatgctgcgccagccggagctagtgcatcaagtggttcaggaggtgaggcgcacactgcccggggatttcagtgtctcggtgaagatgcgtctgctgggaggagaggagtccttgcagcgcactatcgatttagcccgtcagttggagagcgcgggcgtcacctttctaactcttcacggtcggacgccagcccaaaaacactctaaggacacgctagacatcccagccatgtctcaggtgcgccaatccctgcagatccccctgatagtcaacggcaatgtggagagctatagggatgcttgcgatatgcatgaacagacgggagcagctggtgtaatggctgctcgaggcttgcttgctaatccggctctcttcaatagcaactatccagatggtaaaacaacgccactgtcctgtgtacaacagtggctagatatagcctctgctgccggggataacctgcttttccagtgctttcaccaccacctcacctttatgtatagcgctcaaatgaagcgagatcttcgagtgcaattcaacagtttgggttccaaagaacaggtcgtggacttcctgaaggagcactacaatctggaatatagtgaggttgaccctccatcggctgactacacggattgcacgtacacccacttcacaccgcccaagcacgcccggcacatcgccgccgagtcggatgagcaggcctggagttcgaaaagcgacggaaaattctttacggtattcagagcacaccagttgaccggaactggcggagaagatttggaactgggaggactctttggtgacgaggagtaaa

SEQ ID NO: 42642 - protein, 396 aa, DROSOPHILA
MHLPQQRPHHDIAAMFAEAQSDFVRVSAPMVRYSKLEFRRLVRLNGVQLAFTPMMISDSINNSEKARQNEFSTGADDQPLIAQFAAKDPTEFVTSAQLIYPYVDGIDLNCGCPQSWAMAKGYGCGMLRQPELVHQVVQEVRRTLPGDFSVSVKMRLLGGEESLQRTIDLARQLESAGVTFLTLHGRTPAQKHSKDTLDIPAMSQVRQSLQIPLIVNGNVESYRDACDMHEQTGAAGVMAARGLLANPALFNSNYPDGKTTPLSCVQQWLDIASAAGDNLLFQCFHHHLTFMYSAQMKRDLRVQFNSLGSKEQVVDFLKEHYNLEYSEVDPPSADYTDCTYTHFTPPKHARHIAAESDEQAWSSKSDGKFFTVFRAHQLTGTGGEDLELGGLFGDEE

SEQ ID NO: 42643 - DNA, 4011 bp, DROSOPHILA
tgaaagagtttcattttaagagccttaaattattcacacgtgaatttacaattattgttcattagagtcaacaacaataacaaccaacaataatcaattggttttaaaactataatttctgtcatcaatttgcctaagagagaggggctaagagagcgccaaccgaccaacaaaaaagtgggaacagtttgtgacccaaagtgatttcccaccagctattgttcgagtgtcgttggtaacaaaatcttttggccaaatcaacgcaacacttgagaaatccttatcgattcaaagaactatgcgataaatatgctcaggagataggcactcaacgattaagaaaattgccaagtaattgtttttctataaatatatggcacgaaatatacgaacccaactataatcccggtgaccgattcgttccctaatctcgcagattggacacgcttcacaaatcactgtgcagagcaatcggatataggtattttcgaaattaatagctaaattgaaaaaaaaagtatttgaatggcactctcgtataaaagaataaacctattactatatacccctttgtgtaagtagtataaaatagtacacactcctttctataaactttcaacagtattttaatgttttgattatgttaattgaacaaacttcgcatttgaattttaaagtatcaacgaatcaaagctaaattagttagatcaaaagaataaaacaagtcagttgcgccggtttttaatgatttctcaaaactagccagattggctgaaccgacagctctggaggctgtccagagaagtcggagtataaaaggcagccgtcaccggcgatcggtttcagagtgaacctcaggcaacttggaggagcatcaacggatcgggaactgaaatcgagttgggcaaacaaatcaaaaacgaaaacggggaaataaaaccaaaacaaacagaacgtaaaaagtgcaaatagaaaacgatatcgcaacattgtcagcggtatggatgccaaggagtttcgggaattcggcaaggccgccattgactacatagccgactatctggagaatattcgggatgacgacgtactgcccaatgtggagccaggctatctgttggacctgctgcccacagagatgccggaagagcccgaagcgtggaaggatgtcctcggcgacattagtcgcgtcatcaagccgggactgacccactggcagtcgcctcacatgcatgcctactaccccaccagcacctcgtatccctccattgtgggcgagatgctggccagcgggttcggcgtcatcggattcagctgggtatgttggtttatggtgaaatctgctgctgctgctgctgctgcttctggcccattgttttggccggctgaatgggcgctcattgtgcgcggtgggtgaaagtgaatccaagaactcgacaaacaggttgccactgcaccggaccgaagagagttgttcacacaaatcaatcggcaattgtcaccaaataaaagttattgggcagcagactcaccttaaaggcatacaaataaatttaaatgtatatagaattgattagccaaacccaaactagacgtttcgcaaacaatatttgtcattgcgaacaaagaagttaccaccgaacaaaaacttagtgaaataaaccctagtttaaattataatatatttgtaaaaattactatatgtatgtattccggatttaatagtgtattacaaacggatggagttatcttcaatgcataatttcttacataataattcgtataatcccccacagatctgcagtcccgcctgcacagaactggaggtggtggtcatggactggctggccaagttcctgaagctgcccgcacacttccagcacgccagcgatggaccaggaggcggggtgatccagggatcagctagcgaggctgtgttggtggctgtcctagctgccagggaacaagctgtggccaactacagggaatcgcatccggagctgagcgaaagtgaggtgcgtggccgcttggtggcctactcctcggaccagagtaacagctgcattgagaaggctggagtcctggctgccatgccgattcgattgctgccggctggagaggatttcgtacttagaggcgatacactgagaggagccatcgaggaggacgtggcagcgggcaggattccggtgatctgcgttgccactctgggcaccacgggcacttgtgcctatgacgacattgaatccctgtccgctgtctgcgaggaattcaaggtgtggctccatgttgatgccgcgtatgccggtggagcctttgctctggaggaatgttcggatttgcgaaagggattggatcgcgtggactcgctaaacttcaacctgcacaagttcatgctggtcaacttcgattgctcggccatgtggctaagggatgccaacaaggtggtcgacagcttcaatgtggatcgcatctacctgaagcacaagcacgagggtcagtcgcaaattcctgacttccgtcattggcaaatccccctgggtcgccgcttccgagctctaaaagtctggatcacattccgcactctgggagccgagggattgcgaaaccatgtgcgcaagcacatcgagttggccaaacagtttgagcagcttgtgctcaaggattcgcgattcgagctggtggctcctcgtgccctgggactggtttgtttccggcccaaaggtgacaatgagattaccacccagttgctgcaacggcttatggatcgaaagaagatctacatggttaaggccgagcatgcgggtcgtcagtttctgcgattcgtcgtatgcggcatggacaccaaagcctccgatattgatttcgcctggcaggagatcgagtctcaactgacggacctgcaggcggagcaatccttggtggcccgcaaatcgggaaacgtcggcgatcttgcgcagcacttccagatccatctgagcaccgaaaatgcaacgcacgagaaatctcagtgagaaaaacggataaactatttatgtttagggacaacctagttagtttgcgatgtagtttttaactttccacatgtttataaataaagtgaaattaaatgtacgatcatttggcacgttttctataaaggtagagtggtttttccctgtcatttttttttgtcgaaaaagttcccaacattctctgttaaactttctgccgaggctttagttttttaagcattacaaatatcgtcgactttattttaaaatttaaaaccaaaattttcgcggcttagtgtgactgcatttggttatgaatcgatacacttcttcatcgcccttcgataagttcgccaaggtctatcgtcagtgtcgcatccgcaggcaaacagctgtttctcccaattggaccacctgatatcggttaaataacaaagtataaacaaaacaaaaatatctgtttcccttaattcaatattttgattagctttgaatagcgtttagtgccatttctcataaatatagaatagaagcagccgcggctcgcctttgtacgaattctcagatttccgtgaggtaaataatcatatatgtaacatacaaatacataagaattactataaccctttcagccaagtttggaattagacacccaaactgcaattggataaccggcgaccattgtggtggatactatgattctgctttttaaaaacaacttggacgtgtggcactttaaaggcctatacgcctctcagcctgtcaacaaatattaaaaaatctggcaaaattctaaaaataacttgatttactttcggaactccaggaaactaggcccgcttgccatgcaatggtaagttgaacagctccagcggatttgaatgtgcaaactaaaccttctcttgttccccgcagttttaaactggccagcaggcgcagcttatacaatgcacgggttctacaggcggataacatcggcgacaagcaacgcagtccagatctggaggcggcgcgccaaaat

SEQ ID NO: 42644 - DNA, 1533 bp, DROSOPHILA
atggatgccaaggagtttcgggaattcggcaaggccgccattgactacatagccgactatctggagaatattcgggatgacgacgtactgcccaatgtggagccaggctatctgttggacctgctgcccacagagatgccggaagagcccgaagcgtggaaggatgtcctcggcgacattagtcgcgtcatcaagccgggactgacccactggcagtcgcctcacatgcatgcctactaccccaccagcacctcgtatccctccattgtgggcgagatgctggccagcgggttcggcgtcatcggattcagctggatctgcagtcccgcctgcacagaactggaggtggtggtcatggactggctggccaagttcctgaagctgcccgcacacttccagcacgccagcgatggaccaggaggcggggtgatccagggatcagctagcgaggctgtgttggtggctgtcctagctgccagggaacaagctgtggccaactacagggaatcgcatccggagctgagcgaaagtgaggtgcgtggccgcttggtggcctactcctcggaccagagtaacagctgcattgagaaggctggagtcctggctgccatgccgattcgattgctgccggctggagaggatttcgtacttagaggcgatacactgagaggagccatcgaggaggacgtggcagcgggcaggattccggtgatctgcgttgccactctgggcaccacgggcacttgtgcctatgacgacattgaatccctgtccgctgtctgcgaggaattcaaggtgtggctccatgttgatgccgcgtatgccggtggagcctttgctctggaggaatgttcggatttgcgaaagggattggatcgcgtggactcgctaaacttcaacctgcacaagttcatgctggtcaacttcgattgctcggccatgtggctaagggatgccaacaaggtggtcgacagcttcaatgtggatcgcatctacctgaagcacaagcacgagggtcagtcgcaaattcctgacttccgtcattggcaaatccccctgggtcgccgcttccgagctctaaaagtctggatcacattccgcactctgggagccgagggattgcgaaaccatgtgcgcaagcacatcgagttggccaaacagtttgagcagcttgtgctcaaggattcgcgattcgagctggtggctcctcgtgccctgggactggtttgtttccggcccaaaggtgacaatgagattaccacccagttgctgcaacggcttatggatcgaaagaagatctacatggttaaggccgagcatgcgggtcgtcagtttctgcgattcgtcgtatgcggcatggacaccaaagcctccgatattgatttcgcctggcaggagatcgagtctcaactgacggacctgcaggcggagcaatccttggtggcccgcaaatcgggaaacgtcggcgatcttgcgcagcacttccagatccatctgagcaccgaaaatgcaacgcacgagaaatctcagtga

SEQ ID NO: 42645 - protein, 510 aa, DROSOPHILA
MDAKEFREFGKAAIDYIADYLENIRDDDVLPNVEPGYLLDLLPTEMPEEPEAWKDVLGDISRVIKPGLTHWQSPHMHAYYPTSTSYPSIVGEMLASGFGVIGFSWICSPACTELEVVVMDWLAKFLKLPAHFQHASDGPGGGVIQGSASEAVLVAVLAAREQAVANYRESHPELSESEVRGRLVAYSSDQSNSCIEKAGVLAAMPIRLLPAGEDFVLRGDTLRGAIEEDVAAGRIPVICVATLGTTGTCAYDDIESLSAVCEEFKVWLHVDAAYAGGAFALEECSDLRKGLDRVDSLNFNLHKFMLVNFDCSAMWLRDANKVVDSFNVDRIYLKHKHEGQSQIPDFRHWQIPLGRRFRALKVWITFRTLGAEGLRNHVRKHIELAKQFEQLVLKDSRFELVAPRALGLVCFRPKGDNEITTQLLQRLMDRKKIYMVKAEHAGRQFLRFVVCGMDTKASDIDFAWQEIESQLTDLQAEQSLVARKSGNVGDLAQHFQIHLSTENATHEKSQ

SEQ ID NO: 42646 - DNA, 4157 bp, DROSOPHILA
acttcgattgctcggccatgtggctaagggatgccaacaaggtggtcgacagcttcaatgtggatcgcatctacctgaagcacaagcacgagggtcagtcgcaaattcctgacttccgtcattggcaaatccccctgggtcgccgcttccgagctctaaaagtctggatcacattccgcactctgggagccgagggattgcgaaaccatgtgcgcaagcacatcgagttggccaaacagtttgagcagcttgtgctcaaggattcgcgattcgagctggtggctcctcgtgccctgggactggtttgtttccggcccaaaggtgacaatgagattaccacccagttgctgcaacggcttatggatcgaaagaagatctacatggttaaggccgagcatgcgggtcgtcagtttctgcgattcgtcgtatgcggcatggacaccaaagcctccgatattgatttcgcctggcaggagatcgagtctcaactgacggacctgcaggcggagcaatccttggtggcccgcaaatcgggaaacgtcggcgatcttgcgcagcacttccagatccatctgagcaccgaaaatgcaacgcacgagaaatctcagtgagaaaaacggataaactatttatgtttagggacaacctagttagtttgcgatgtagtttttaactttccacatgtttataaataaagtgaaattaaatgtacgatcatttggcacgttttctataaaggtagagtggtttttccctgtcatttttttttgtcgaaaaagttcccaacattctctgttaaactttctgccgaggctttagttttttaagcattacaaatatcgtcgactttattttaaaatttaaaaccaaaattttcgcggcttagtgtgactgcatttggttatgaatcgatacacttcttcatcgcccttcgataagttcgccaaggtctatcgtcagtgtcgcatccgcaggcaaacagctgtttctcccaattggaccacctgatatcggttaaataacaaagtataaacaaaacaaaaatatctgtttcccttaattcaatattttgattagctttgaatagcgtttagtgccatttctcataaatatagaatagaagcagccgcggctcgcctttgtacgaattctcagatttccgtgaggtaaataatcatatatgtaacatacaaatacataagaattactataaccctttcagccaagtttggaattagacacccaaactgcaattggataaccggcgaccattgtggtggatactatgattctgctttttaaaaacaacttggacgtgtggcactttaaaggcctatacgcctctcagcctgtcaacaaatattaaaaaatctggcaaaattctaaaaataacttgatttactttcggaactccaggaaactaggcccgcttgccatgcaatggtaagttgaacagctccagcggatttgaatgtgcaaactaaaccttctcttgttccccgcagttttaaactggccagcaggcgcagcttatacaatgcacgggttctacaggcggataacatcggcgacaagcaacgcagtccagatctggaggcggcgcgccaaaatacccagatagtggtcgtgggcgcaggactcgccggtctctcggcggcccagcacctcttgtcgcacggctttcggcgcactgtgatcctggaggccacagatcgttatggcggcaggattaacacccagcgctttggtgacacctactgtgaactaggcgccaagtgggtaaagatcgatggatcgcaggattcgatgtatgaactgctacgcaacacggaaggcttggggaagcagataaagcagccggatcgggccacctatcttcaggatggaagccgcatcaatccagccatggtcgagcttatcgacacgctatttcggcagctttgccgaggcttcaaggtctccgaacgagttaaaacgggtggtgacctgcactcgctggacaatgtcatgaactactttagaacagaaagcgatcgcatcattggcgtctccttccagcatcctaaggatcaactggcggcacgcgagatcttccaatcgctgttcaaggagttcggcagcatattgggatgctgcctggagtacgtgaacatcgaacacataaccaagtgtccagtgcagcaggaacagcgcccgctgtatgtgcccactggtctagataatgtagtggacgatctcattcagaacatggacaaagcgcagctgcagaccggaaagcctgtgggccagatacagtggacaccagcgccgatgaaaagtgtgggttgcctggatggcagtctttacaacgccgatcacataatatgcaccctgccgctgggcgtgctcaaaagctttgcgggcgttctgtttcgacccacgctgccgctggacaagatgctggctatacgcaacctcggctttggcaatcccctcaagatatatctctcctacaagaagcccattgggcgttggctaaagggaagcctgcggccactgggaacgcttctgaatccttccgtggagcagcaacccgaacgcaactggacgcagcaggtcgtggagatcagccaggtgcccagcagtcagcatgtgctggaggtgcatgtgggtggcggatactacgaggagatcgagaagctgcccgatgaggagctgctggagcagataactggtctgctaaggcgctgcgtgagcagtcacctggtgccgtacccacaggaactgctgcgttccaactggagtacgtcggcctgctacctcggcggtcgtccttacttctccaccaacagcagtgcccgggatgtccagcgactggccgctccgctgggcgagaagtcgcccggtctgctctttgctggggatgcaacctcgttgagaggctttggaaccattgatgccgccaggtccagtggcatccgagaagcccaacgcattattgactactatctgaaaagcgtgcactgcggttaagtgcaatgggaaatccgaatgggctgctaaattgtacagtgtatatcaacacgaaaactagtcaaaatttatagttacaattcgtttgtatttttaagcagaatacatttgttttaattaggcgcataacgttaacaataaaaatcatgaacaacatcaatgatacaatgataggatactataaatataatgtagcgatggacgaaccatcttttgttgcgatgtaaattccctaaacatgtcgcaagtggaaagtgtatggtctgttccgggttccaagtcacaatgcattatatatcatactggtccaatttaagtttactatattaatttatatactaaacacggaacagacctgcacaaccactttactgctcctgttccatctcgtcggcagcggcgctgacctccttccacgagtactccatgtcctcggactgggtgaatcgcgagcaaatggccatgcgcaggaagtagacatccttgatcttggcgggaaccaagtggatgtggccgcgtccattgattcgcttgagaagagcttcgttccgctcgttgctgcccttcagccggaagcagaccaatcccatattgatctcggcggccagttcaaatctggagtccgccacgcagagatccccgaactgcttggcaaagttgcagtgtctgcggatgtgggcctggagattctcgacaccgtacagccggaggacgaaccagagcttcagtgccctgaatcgccgtccaagtgggatttgccagtgacgatagtccggagctgatccctgcatgtcgtgcttcaggtaaagagggtccacattgaacgcgttgaccacccaactgggatccttcagccacatggccgagcagtcaaagttcaccagcatccatttgtgtggattgaaattgaaagagtctgctgattcgatgcccttcatcaggtggcgatactcggggcaaatgaaagcggatccggcataggcagcgtccacatggatccacaaattgtgcttgtttcccaccggtccacactcatccaagtagtcgaaggcgcaggagttggtggtgcccagggtgaccaccgcgtagaagggaatcaaaccctcggccacatcctgttcgatggccttttccagggcagcacc

SEQ ID NO: 42647 - DNA, 2038 bp, DROSOPHILA
ccacctgatatcggttaaataacaaagtataaacaaaacaaaaatatctgtttcccttaattcaatattttgattagctttgaatagcgtttagtgccatttctcataaatatagaatagaagcagccgcggctcgcctttgtacgaattctcagatttccgtgagccaagtttggaattagacacccaaactgcaattggataaccggcgaccattgtggtggatactatgattctgctttttaaaaacaacttggacgtgtggcactttaaaggcctatacgcctctcagcctgtcaacaaatattaaaaaatctggcaaaattctaaaaataacttgatttactttcggaactccaggaaactaggcccgcttgccatgcaatgtttaaactggccagcaggcgcagcttatacaatgcacgggttctacaggcggataacatcggcgacaagcaacgcagtccagatctggaggcggcgcgccaaaatacccagatagtggtcgtgggcgcaggactcgccggtctctcggcggcccagcacctcttgtcgcacggctttcggcgcactgtgatcctggaggccacagatcgttatggcggcaggattaacacccagcgctttggtgacacctactgtgaactaggcgccaagtgggtaaagatcgatggatcgcaggattcgatgtatgaactgctacgcaacacggaaggcttggggaagcagataaagcagccggatcgggccacctatcttcaggatggaagccgcatcaatccagccatggtcgagcttatcgacacgctatttcggcagctttgccgaggcttcaaggtctccgaacgagttaaaacgggtggtgacctgcactcgctggacaatgtcatgaactactttagaacagaaagcgatcgcatcattggcgtctccttccagcatcctaaggatcaactggcggcacgcgagatcttccaatcgctgttcaaggagttcggcagcatattgggatgctgcctggagtacgtgaacatcgaacacataaccaagtgtccagtgcagcaggaacagcgcccgctgtatgtgcccactggtctagataatgtagtggacgatctcattcagaacatggacaaagcgcagctgcagaccggaaagcctgtgggccagatacagtggacaccagcgccgatgaaaagtgtgggttgcctggatggcagtctttacaacgccgatcacataatatgcaccctgccgctgggcgtgctcaaaagctttgcgggcgttctgtttcgacccacgctgccgctggacaagatgctggctatacgcaacctcggctttggcaatcccctcaagatatatctctcctacaagaagcccattgggcgttggctaaagggaagcctgcggccactgggaacgcttctgaatccttccgtggagcagcaacccgaacgcaactggacgcagcaggtcgtggagatcagccaggtgcccagcagtcagcatgtgctggaggtgcatgtgggtggcggatactacgaggagatcgagaagctgcccgatgaggagctgctggagcagataactggtctgctaaggcgctgcgtgagcagtcacctggtgccgtacccacaggaactgctgcgttccaactggagtacgtcggcctgctacctcggcggtcgtccttacttctccaccaacagcagtgcccgggatgtccagcgactggccgctccgctgggcgagaagtcgcccggtctgctctttgctggggatgcaacctcgttgagaggctttggaaccattgatgccgccaggtccagtggcatccgagaagcccaacgcattattgactactatctgaaaagcgtgcactgcggttaagtgcaatgggaaatccgaatgggctgctaaattgtacagtgtatatcaacacgaaaactagtcaaaatttatagttacaattcgtttgtatttttaagcagaatacatttgttttaattaggcgcataacgttaacaataaaaat

SEQ ID NO: 42648 - protein, 502 aa, DROSOPHILA
MFKLASRRSLYNARVLQADNIGDKQRSPDLEAARQNTQIVVVGAGLAGLSAAQHLLSHGFRRTVILEATDRYGGRINTQRFGDTYCELGAKWVKIDGSQDSMYELLRNTEGLGKQIKQPDRATYLQDGSRINPAMVELIDTLFRQLCRGFKVSERVKTGGDLHSLDNVMNYFRTESDRIIGVSFQHPKDQLAAREIFQSLFKEFGSILGCCLEYVNIEHITKCPVQQEQRPLYVPTGLDNVVDDLIQNMDKAQLQTGKPVGQIQWTPAPMKSVGCLDGSLYNADHIICTLPLGVLKSFAGVLFRPTLPLDKMLAIRNLGFGNPLKIYLSYKKPIGRWLKGSLRPLGTLLNPSVEQQPERNWTQQVVEISQVPSSQHVLEVHVGGGYYEEIEKLPDEELLEQITGLLRRCVSSHLVPYPQELLRSNWSTSACYLGGRPYFSTNSSARDVQRLAAPLGEKSPGLLFAGDATSLRGFGTIDAARSSGIREAQRIIDYYLKSVHCG

SEQ ID NO: 42649 - DNA, 4117 bp, DROSOPHILA
aaagggatgtcctcaaggagcaccgccaatgggaaaaggccgagcaggagcgcatgaagtgcaagtcggagataatcgagcacttggccaatgtgcacagattagaacaacaggagacggaattgcgccagaaactcaggcaaatccaatcgcgatttgatggtgtaactttggaacagaagaataccattcgagaactgcaggaggagcgagaaaagagcaggaaagcgaatgactcttgtttggtcttacagaaggagctgaaacaactcaccgataacttccagaggttgaagtacgcttgtagcattaccgacagccagctaactgaggtggagaccatgctaaaatcggagcaggaacgaaataaatcccagaaatctcaacttgatacccttcatgagaaactcagagagcgcaacgatcaattaactgatctacgaaagcaactaactacggtggaatcggaaaagcgtctggcggagcagcgtgctcaagtgttggcatcggaaatcgatgaacttcgtctcaatctcaaggagcagcagaagaagctggtggcgcagcaggatcagttggtggagcagactaacgcactgtttgccacccaagagagagctgaacttttggatgggcaaaatgccaattacgaagcccaaactgcggattcgaatcgcgaaatggttagtttgaaggaggaaaatgctagaattctcagcgagctgttccacaagaaggaggaggttggcaatcttcaggcggagataaggggcttggagtctgcgcaagccaacttgcacgcagagatcgattcccttcaggacactttggccgagaaggagcagttctacgtgcagcgggacattaaatcgaatgccacacttgcgcagcacaaaaagctgattgactaccttcaggtatagctagtttatatatattctttttaagagaatagttaatgagattaaaaacatttttgtatttatattttagctcaaagttgaggacctatccgccaagaagaaaaagacattggcggacaaacttttcggttctagccacacaaacaaggagaacgtgtcacccaatgacgtggaatcttccattctgtatcgcgctctaaaggaggaactgaagcgagaacaaaagatgaacagcttgctgaaggagcagttggctcagttgaatggtgggatttctttagatttcgcttgatgtttgtatctaattgtatatttcctttaggaactgcaaccttgcgctctccacgcaaatctgcagctgttaatggcgactccgatgcacccaaacagagacccgtaagcattgctgccttgccacgttctccacagaagcagcagcagcccctgaagcgcaccaccagccaggtggagctgaagacgacggcggagaaaccgactaaagtaaccattgagaaccaggctcatcaccgtttcgaactggccctgcaggagtccaaggtggatgccgtcaactgtgtagtttgcgaaaaggccgtcgttgccggttcgccgttctggaaatgcaaggagtgcaaagatgttacgcatcgcaagtgtcgctccaatgttcagagccattgcggatccaccaagccgactgcaccgtcagccgatgatcttagcagtattcaatctgtctccagcttgactttggatagcgtagatgttgcgggtggtacaaccagcggtggcgagtacattggatcgctggtctacagttcggatggtgcagaagatcaggcacggaaggagatcgaagtgaactgcgcctttgaagtggccgagcagcaaatactcctattgggctgtaacacgggactgtatgcgtatcacttggactcgcagcgattggtgcacatttctggtctcgaatcggtgagctgcatgtccatttgcaagcgcctggctaaggctataatggtgggcacagttggcgagaagctatatcaatgtgactaccgccagctggagtcacgctgtcagagctccagttcgtgtcacaagcctgtgctggaaacgtcggccattgagctgccatttgccaatcgcacgccatcggagaaatggaaactagtgctgatctccgatgaggcggagaacgcattggattcggtggctattgcggccacgtccactaggattgtcatcttgaagtacgaccttaagctgcacatgtttaagccagttcgagccttggacacggccacgccggtcacatccatattctttacgcgtcactcggccattgttagctcggataagttctacgagatcgatttggacaactatgcggctgaggagtttgtggatctgtccgataagtcaatggagagcactgccaagtgccagcccctaactgcggtgcgcatctcacgacaagagtatctgctctgctttgccgaatatggcgtctttgtggacgagtttggctgcagatccaggccgtacgatttgaactgggtctatgcacccactggatttgtttaccgcgatccattcctattcatatcgcactatcaaagcgtgcagatagtccgtttgcatcggtcgttcagcaaggaaatggccagcggggataacgcatcggagaattcggaatccccggaactgcagcgcgtctacttgccccactacatgtccacgctgctggccaacagcggagatgtcaatctctatgccgtggccatcgatcagaggccctgcaatggaacacagaagatctaccatctggacacgatgcaggcattcaagcagaagttcaatatctccatggaaacgctgtcttcagtggccacttctgtgactttgggctcgactgtcaccggaaatagcatatagatgaaggatatatattaactaaacgaatggacaaagcaaaatactacaaactgagtagttgtagttatatctagggttaggatatgctatacatttggattattattattttaacttgtcagaacatatgttttttcacaatctttttcatgtgtaacgattgcctaaaatcacatggcagaatcttttaaaaattacttaatttactctttaaatactttgtgctgtatacacaaataaaacttgagattttgataaaaaaggtaattcatattaaattaatatatttattttgatcactaaaatatcgaagcatattaaaggaaatattttttaattaattaaagaagtcgcataatattttaaatcaattttactatgcaggatagcttttcgaatagaatagttgggggcatggagtcgacgccaagcttttggggctgatcccacgcagcttttcggcagcagctttcaatgtcccgcaattcgaaagccccggaaatggaatcgtgctctccgctggcattactgccatcgttggcttggccgctggacgccggactgctgcactgccgccgtcgcagattgtgttaattgatttcaattggctccacgccatttgagtggcccgttgaatctcccgacgatgccagcaacgatgtttgattcccagctgagtttgtgcgcgggtcgcattgtcgccgattccaccaccaccactacctccggcatggatggatgcgatggtgccaagacgatgatatgccgcgcttgtcttgtgctactgggtccgcaggatgcgtgtcacaatctggacagcgaacaggatctggccagcaagtactacggctgtactggagaggatgccgttagggatttgccaccccagttggtgctgaaaagcatctgcgagtgctgctatcagttggtgcaaaagttccacgactttcaacgcatgtgcgcagagtccttgcgcaattttgagaagctgctgcaggacatcgacatcggatgccacaaactggaggaccacacttggcacgacttggacaccccctcggagagcaacgagtccactaatccggaagcccagtcgcacgcaccctgcatcgcagcgacgcaggagattgtgagttttatctggccacaagtgtgcctgcctctggccgtaatcttatctagaatcacattgggtgcttcgctcgaggtgtgttgcctagcagccaagcaaagacaatactgctccccattccccg

SEQ ID NO: 42650 - DNA, 2117 bp, DROSOPHILA
ttgaggacctatccgccaagaagaaaaagacattggcggacaaacttttcggttctagccacacaaacaaggagaacgtgtcacccaatgacgtggaatcttccattctgtatcgcgctctaaaggaggaactgaagcgagaacaaaagatgaacagcttgctgaaggagcagttggctcagttgaatggtgggatttctttagatttcgcttgatgtttgtatctaattgtatatttcctttaggaactgcaaccttgcgctctccacgcaaatctgcagctgttaatggcgactccgatgcacccaaacagagacccgtaagcattgctgccttgccacgttctccacagaagcagcagcagcccctgaagcgcaccaccagccaggtggagctgaagacgacggcggagaaaccgactaaagtaaccattgagaaccaggctcatcaccgtttcgaactggccctgcaggagtccaaggtggatgccgtcaactgtgtagtttgcgaaaaggccgtcgttgccggttcgccgttctggaaatgcaaggagtgcaaagatgttacgcatcgcaagtgtcgctccaatgttcagagccattgcggatccaccaagccgactgcaccgtcagccgatgatcttagcagtattcaatctgtctccagcttgactttggatagcgtagatgttgcgggtggtacaaccagcggtggcgagtacattggatcgctggtctacagttcggatggtgcagaagatcaggcacggaaggagatcgaagtgaactgcgcctttgaagtggccgagcagcaaatactcctattgggctgtaacacgggactgtatgcgtatcacttggactcgcagcgattggtgcacatttctggtctcgaatcggtgagctgcatgtccatttgcaagcgcctggctaaggctataatggtgggcacagttggcgagaagctatatcaatgtgactaccgccagctggagtcacgctgtcagagctccagttcgtgtcacaagcctgtgctggaaacgtcggccattgagctgccatttgccaatcgcacgccatcggagaaatggaaactagtgctgatctccgatgaggcggagaacgcattggattcggtggctattgcggccacgtccactaggattgtcatcttgaagtacgaccttaagctgcacatgtttaagccagttcgagccttggacacggccacgccggtcacatccatattctttacgcgtcactcggccattgttagctcggataagttctacgagatcgatttggacaactatgcggctgaggagtttgtggatctgtccgataagtcaatggagagcactgccaagtgccagcccctaactgcggtgcgcatctcacgacaagagtatctgctctgctttgccgaatatggcgtctttgtggacgagtttggctgcagatccaggccgtacgatttgaactgggtctatgcacccactggatttgtttaccgcgatccattcctattcatatcgcactatcaaagcgtgcagatagtccgtttgcatcggtcgttcagcaaggaaatggccagcggggataacgcatcggagaattcggaatccccggaactgcagcgcgtctacttgccccactacatgtccacgctgctggccaacagcggagatgtcaatctctatgccgtggccatcgatcagaggccctgcaatggaacacagaagatctaccatctggacacgatgcaggcattcaagcagaagttcaatatctccatggaaacgctgtcttcagtggccacttctgtgactttgggctcgactgtcaccggaaatagcatatagatgaaggatatatattaactaaacgaatggacaaagcaaaatactacaaactgagtagttgtagttatatctagggttaggatatgctatacatttggattattattattttaacttgtcagaacatatgttttttcacaatctttttcatgtgtaacgattgcctaaaatcacatggcagaatcttttaaaaattacttaatttactctttaaatactttgtgctgtatacacaaataaaacttgagattttgat

SEQ ID NO: 42651 - protein, 548 aa, DROSOPHILA
MFVSNCIFPLGTATLRSPRKSAAVNGDSDAPKQRPVSIAALPRSPQKQQQPLKRTTSQVELKTTAEKPTKVTIENQAHHRFELALQESKVDAVNCVVCEKAVVAGSPFWKCKECKDVTHRKCRSNVQSHCGSTKPTAPSADDLSSIQSVSSLTLDSVDVAGGTTSGGEYIGSLVYSSDGAEDQARKEIEVNCAFEVAEQQILLLGCNTGLYAYHLDSQRLVHISGLESVSCMSICKRLAKAIMVGTVGEKLYQCDYRQLESRCQSSSSCHKPVLETSAIELPFANRTPSEKWKLVLISDEAENALDSVAIAATSTRIVILKYDLKLHMFKPVRALDTATPVTSIFFTRHSAIVSSDKFYEIDLDNYAAEEFVDLSDKSMESTAKCQPLTAVRISRQEYLLCFAEYGVFVDEFGCRSRPYDLNWVYAPTGFVYRDPFLFISHYQSVQIVRLHRSFSKEMASGDNASENSESPELQRVYLPHYMSTLLANSGDVNLYAVAIDQRPCNGTQKIYHLDTMQAFKQKFNISMETLSSVATSVTLGSTVTGNSI

SEQ ID NO: 42652 - DNA, 4928 bp, DROSOPHILA
accggccttattataacgcactatttaataccactgcacatacaagaaataccaaatacaaatacctagcaattaaaaactactttggtatttaaattagttggaaattaaataagtatgctacatattaattatattagccttttagttttaggaaactctatgagttaaagaaagtatccaattatcgatatattgcctgaaatactacctacactgcttgcttgctatgttaatacagttcaaaacagaccgatggtattttctacctaacagcaagcagtcacatcgccacaaaaacataaacaaataaaacgatttgaagatgaatccgctaacaaatatgaaaaatgtgctcaaactgagcgaacacgaactgcaacatggcggaaagaagagctggcacgacatgtacaaggactcagcctggattttcgtcgcaggatttccgtataccctaactgagggcgacttggtttgcgtattctcgcagtacggcgaagtggtcaacatcaatctaattcgagattcaaaaacgggaaagtccaaggtaatgcttagttaccctttcaagaaagttcctgaaatcattgtttaaacttgtccagggcttctgcttcctgtgctacgaggaccagagatccacagtgctggccgtggacaacctgaatggcatcaagatcctcgataggacactaagggtcgatcacgtggccgactacaagcctcccaaggaaaacgagaagatggacgaggaaacccttcgcctttacatggagggctgtgcgccgaaacctcaacttcagcacatcaagactgagaagaaagacagcaaaaattatagatgataagataaggttagcttaaacatagcaaagcatgcaaacagaatttttatattaacttaaattttttagttattaaacgctaaattatactactacattcttttttaaagccagtaatttaaggtgcaagaatgaattggctttccaacctctcattcgccatcagcgctcgcaaaggagtcgtcatcatcatcatcatcctcatcctcttcttcctgaccctccagttccttcagaatccttcgcttgtagcgctcataggcgctgcccctctcccggtcgacattgtaaaagtccacgtcgtccacaaacgagtcttcctcagtgtcgatcgtgtgcacgtagggatcgcgaaaggtggcatagtcatcatcatcgctggtgctggcaaactcatcctcgtcatcatctggaagaagaagcatatgcatattcataagcggaatctatgcaaacagttaacacagatcttaccgagcataaacttgttcatttgccggcacaactcatcatccgaacccatggcgcccgcttcgtcgtcgtccgggtaatcattggtaaagtagttctcctggttcgagtcctccgagtcgtagtcctcgtcctggtcgttgtagcaatcttctaggacaatctcgcccacaggaatcacactgcagaataggcgaaacaattagtgagtttatttcgattctttgatcacgcagcatttttaaattgaaacacaacaaagtttgtcacgtattttgagagtttctttatttagtttatattcgatttcgggcaacgctaggccccaacagatataaagcaaaacaaactaagactatgcacttaattagacttcagcactagtgttatccgtttttttttgtttattgtcggaatggaaaaagaaccaaaaaggcaactgacaactggcggaaactaaacgaaaaatgctcggtgagctgtttttcaaaaaaatgcggtgtgtgtgtgttcgtgtgtgggggtaaattattctaatctaatagctaattaattctatgaacataaggtaatgagagacatttgcctaaaacgattccaaatagtacactaattgtgcgtttttagcaggatacatcttatttttattaaaaactttggcaagagggaactttatgggaactttacataactatgatacattatttaaactaagaagtttagatctaacatattttttaaatggaatatggcataacatagttgtgttagaattgaacgaaatctcacagtaacaaatcaaataaatagcttccagaatcattcgttttcagatcatgccgtgtttactcataaaaacaatgttttatcgttagttttgggcatttgtcaaatgtgctgactgcaatgaactgtaagtgatgtgagttgccagttgcagtccttttttttattgtcgtgggtggggcattgggtgtctcctgtcctcacacttcctaagtgcctgcgactttgtctgtctctctccatttagtttatttcttgtttaccagtagcagttgttgtagtaattaaacggataatacaaccttatggagaacgaacgaatcgtattattgagctgtagtgattgcaatcgtgtctagatgataaggataatatgcaagtatgagactgcgcccgaggacaacgaacacagacacacgcacacccacacccacacagatacgcccatagcaccgacacacagacacaccgcttagatatatatattccatatagtacataagtgtagtggtgatcgattacatatagtaattggtaatgctcaacgttttctgtggctcaacttgaatgacaaaccttaagtagttgtcgtccatcatgtccacatatgccgcctgcatctcgttctcgggaacatatagatcgtagacatagcccacgtccgaatcggccggctgctgctgatcctggctgggtgctatctcctgctgctgctgctcctcagctgctgcacttgcagtgcccatgtgctgttgctgttgcgattcaatgtccacgatggttatgtggctgctggactcatgactctggctctccgggcattccgcttctgcggcactgttttcgagcgtgctgcgcaggcagtttacgacccggaaacgctgctcccttgagttctcctgagcctcctgccgctggcgatctctgcgcagcgcactagcaatggctgcatcattggagcgctgctgttgcaccagatcacgggctgcggccttgttgagcctggcagcggcgaatttacgagtggcacagtcgtcctgcgaaagaggcatacaaattaataaatcaattttagattcattagatctttggatcattagtcaaaattaccaataaccaaactagagctatcttttattaagttcccactatttattgcggctgtaaaatgggaatttgctatgataaatgtgcattcactttacagataacaggccagcacctttaactaaggttaaagatcactactaactgataagtattattaaaattgcacacatatatgtgttaccttagattagctatttgtaagaatcattaaagaaaaaacaaatcagttcaatgagtgcatttttgcagagtttgctagcccatatcgttttgcatctcaaagatgaggacgttgacctttttataagcagcactaaaagaaccaacagcgtgcattcgagccacagcaatatatagaaagtagtggccaccaagggcatgtgaattatatctacgtttgcttctctaagcccccaatcccacctgcttttccagcgtgccggcaaacttgagcacggtggtcagttcgtctttgtctgatgccaccgctcccgccaccgctcccgccaccgctcccgcgtcctccagggcgttctcatcgttgtggaggcgccgccgcttgccgtttagcacaaatgccgtctgaggctcctcgtcgatgcgtcgcttgattcgcacaaccgctggcattttgattaattcggagaatacgacaaacaacgaaaggcgaagcgaaacaattaaaagtgtgcgacgcgcagtgtgaccgttcggggcatgccaaaatatatctgcaactctggaatttcatcaatacaaattttagagatggaattggttgagactgcgaaactatcgtgacgaatccttaaatcgtagagccagtaaactaaatttcacgatttaattgtgaattattaattgtgatttaatctgttgataatcattcaaaataatatacgacaagaaaagattggcaggtttggcagtggcagtagtaggtagttggcactatcaatcatttttttttctatatttctatataatgtaaactgtaactgttttgcattgagtattttgcatttattgagtattttgaatttattgagtattttgtatttatacaggaagtaactatgttcgacagttttgaatgcccgccaatttcgaatacttttcatccccgtttccggcacttccggtgcttctacccccaatcagctgatcgaaagccgacactccggggatgaagtccccaaaagaagttgaagctcgcaggaatggcagttagtgctcttagccggcgaagtgtggttgacatagcgggtggtttccgtgctccagacttccggcctaaatcagccgtcggaattacgttcataaaagtgaaatgttggccagaagcggcgacttcggcttccttgtgtttttaatcaacgccagcagtgccacaagattaaagtgagctcagcctcggattgaattgatgccattaaaccgtgaatggcgcccaagtgttttcgcttttccgcccgcgctttttgccatttgttgcggtgcctcgatggacgtgtgtgtgtgtgtatgtgtgtgtgtgtgccgctattctcgtcctgccaaaatgaaactcgtataggcccgagaatgatttagtgcccgatcgcaatccgcgaatgccgcaattatgttttaattggcgctaaatggtttactcacacgcgcacgcacgaaaggattagcagcaggagtcgaaatttcttcgcaaaggtgggt

SEQ ID NO: 42653 - DNA, 1187 bp, DROSOPHILA
cgaacggtcacactgcgcgtcgcacacttttaattgtttcgcttcgcctttcgttgtttgtcgtattctccgaattaatcaaaatgccagcggttgtgcgaatcaagcgacgcatcgacgaggagcctcagacggcatttgtgctaaacggcaagcggcggcgcctccacaacgatgagaacgccctggaggacgcgggagcggtggcgggagcggtggcgggagcggtggcatcagacaaagacgaactgaccaccgtgctcaagtttgccggcacgctggaaaagcaggacgactgtgccactcgtaaattcgccgctgccaggctcaacaaggccgcagcccgtgatctggtgcaacagcagcgctccaatgatgcagccattgctagtgcgctgcgcagagatcgccagcggcaggaggctcaggagaactcaagggagcagcgtttccgggtcgtaaactgcctgcgcagcacgctcgaaaacagtgccgcagaagcggaatgcccggagagccagagtcatgagtccagcagccacataaccatcgtggacattgaatcgcaacagcaacagcacatgggcactgcaagtgcagcagctgaggagcagcagcagcaggagatagcacccagccaggatcagcagcagccggccgattcggacgtgggctatgtctacgatctatatgttcccgagaacgagatgcaggcggcatatgtggacatgatggacgacaactacttaagtgtgattcctgtgggcgagattgtcctagaagattgctacaacgaccaggacgaggactacgactcggaggactcgaaccaggagaactactttaccaatgattacccggacgacgacgaagcgggcgccatgggttcggatgatgagttgtgccggcaaatgaacaagtttatgctcgatgatgacgaggatgagtttgccagcaccagcgatgatgatgactatgccacctttcgcgatccctacgtgcacacgatcgacactgaggaagactcgtttgtggacgacgtggacttttacaatgtcgaccgggagaggggcagcgcctatgagcgctacaagcgaaggattctgaaggaactggagggtcaggaagaagaggatgaggatgatgatgatgatgacgactcctttgcgagcgctgatggcgaatga

SEQ ID NO: 42654 - protein, 367 aa, DROSOPHILA
MPAVVRIKRRIDEEPQTAFVLNGKRRRLHNDENALEDAGAVAGAVAGAVASDKDELTTVLKFAGTLEKQDDCATRKFAAARLNKAAARDLVQQQRSNDAAIASALRRDRQRQEAQENSREQRFRVVNCLRSTLENSAAEAECPESQSHESSSHITIVDIESQQQQHMGTASAAAEEQQQQEIAPSQDQQQPADSDVGYVYDLYVPENEMQAAYVDMMDDNYLSVIPVGEIVLEDCYNDQDEDYDSEDSNQENYFTNDYPDDDEAGAMGSDDELCRQMNKFMLDDDEDEFASTSDDDDYATFRDPYVHTIDTEEDSFVDDVDFYNVDRERGSAYERYKRRILKELEGQEEEDEDDDDDDDSFASADGE

SEQ ID NO: 42655 - DNA, 16823 bp, DROSOPHILA
acataaatgtttacttaacgcctcacggaagtctggattctaatcgaaaactcgcttaagtcgggtacacaggcttttcaaatctccagttatgcacatagtttccattagcaacagttgaaggtaaaaacgaagagtatatacaaggattggattggttgtagaaagagtatgtgagtgacaatgcaattgagtttattgttttaaaagtacatataaattaatcgtataataattaacttaggacaccttgctcaaagttgtggcaaatgctttcattagaaactaagaaaagtatcatctccgatacatgcgtcaaagtttagtcgcaaaaacaagaatataaaaacactcgagacacaaatcaggcaaaaacaaatcgaaatcgaaatcgaaatggaattcaagagggttgaattccgtttttttgtatggttaaacgaatgaaacttaacacctatttaaagaaactcccaaaatgcaataacaatatgcattgttcaggatcgaggggtatggtaaggatggtcttttagttaaactctcttcatgctgcttcaaaacaaaattgaattttgcatatgatttaaggcgcaaagcgtcgtcattatgattatcatcgttatatcattataaatgtgtttgcaataaacacggcgttataaatcagtatgtctttggatccgcttgcgccgtatatgtcaataacacttgagaatttcaaatcgcttaggtgaatgattaaaaactaaataaaatatatatgcgttcattggcatatatacacgctgctccagaactgtgattatatgtaggtagcggtctcattttttcgatgtaattagttgctaaagttgccttagcctattgattttgtgaacgagattcgaacatcgctgtcacgtcgcgtattgagaattgtggtgagatcttttctctgttgctgtaaaagaaagggtcattagtagagtttaattacaaatcggtggaagctaagtgcttacttggtgcctgcattgctctcggccaaggagttcctctgcaagcgatcgcgtggcatgggctgactacgttcaaatttattcgctggcgtcttgctggtgcttccatatttctgggccgtcgtcttgacgctgagtagcgaagtggaggttatgccacttacgccaccattactggtatcacaattttggttcttttcgtcggaaatccggcgcacgcgctgttgtcccagatgctcctgtccgttaccctggctcaagcccgtgtggagggtgcactccgatccgccgccagtgacgcggctcagttgctttaggttcatgtcgatatccttttgcaaggcatgcatatcgccgcgtgacttggacttgattcgcagggattctgcagccgggaagttgtcttcagagttcagttccgtacgcgaccgagacttgagagtatcgccgtagtacttttgcgttagctgctgacgccgctcctccttgattttgtcgatgcgctcacgatccaagaccacgcctgttaatacgttctttcgacccgccgggggcaggaactgattagccgacgattgctgctctttgggcatattattctgctggatgagtgagatgcggttctcggtggtgggggtaattgcctccatttcgccaacacgcttctggcatatctcctcggtaatgctcataccaggcaaccgctttggtggattcaaggttttaggtcgcgtgaagtcaaagctcttgcgccggctgttgacctctgacattacttcgggcagtttgttagagagagacagatcttgtagttgcttgcccccaaactctctgacgaaggcgttctcatccaacgagcgggttattttttgggcactgctgttcagtttcttgagtggcacgggtgcgggcatcgtcttgggtacgctcagttcgttaggtttcttcatcgagccgccacgcaccgaaaaatcaaagttgggcagctgctccacaggcgagctctcgaatttgttggccaactccttgacactgaaagtgggcgatttgctgggcgacgactgttcgtgttccatgttgtctggcaagctgtctaaactatcaagctcaattctatcaacgttgggtttctgttcttctgtaatgaatttcatctcctcgccacgtagattttcgtaaactgttttcggtttgcgtagctcaatgttttcgtaaagtagctgggattgctcctcatcctcaggctctttctcctgctgctcttcgtggtcgtggtgctcctgttcaagctgcagcagttgctgcgtcatctctgctgccttgtaagcacctccatcgtgctgctcctcctcggcaatctgtttcaggcttgaacgctcatgtaacatttgattaacctcggttaccgagttccggaacagcttcacctgctcatatacagtgttttcatcgaagttggtctctaagatggccgaaggtttcttttccttctcgggcgacttgtatgtgatgctaatggtggattttatggggctgggcaccatcttgacgggggtctgttcgaagtcctcgtacacgggcgaactctcatcagtcgccagcagagagtgcatgcttagctgtcgctgcaagtgctgataaccatactcgctcggtgtcactgactgactagtattgtccgtaaaattggaattgttgggcgatgagcacatggccgctgcagcagcctgcagctgatctttaaccggtaaagtggcagctcgatttgcgggctgtggtaagcgcggctgcagtgggttaaggtccaaggatagctccctttttagggcattcatatcacgctgctcagcatcatggtggttgttgatctgcaacgagttaaatgtcagtttaggattctggagatccactatggggaaaaatcaattttaattcttacgttctgtcccaagctctcgtgcgagctgcctaggtaactgctggacgcatccacacctaaaagcagctgctgctgctgtacattggatgaaacaccggatacgccagacatggccgatgtcagcataaggggctccatgtcatattgcggtgtatttaccgccgaactgttatcggagctttcggtgtcgcacaacaacaaggagtaccggggactgcgggcaggtgttgtaggcgtaggcacatgcagcttgatctgaccatcttcgacgggttccactcgaggttttcgtagagtagcaccgttgttggtactgctaatagaaaaacagtgtatcgtttttgaaatgaacaaccgtgagatgtaatatatgtatactcactgcacaggtcttggagctgaagattcctgtttctgtcctggctgcgtaaaggttccctggtagctgaaacgctccttagcatcctgctgttctttccgtttggcccccagctgcacagacggatagctgtagcgggtcgacgaggaggaggagcctacagatgcaccattcgacgacgatatgggagattggtttgccctagctggctttggtggcgggtgcacttcaacactggcgaactgctgttgagtggtgggcacattttcgggagttccacagtcaatgaactgaatgtcacacaactgatcttccagcttgtatcgcttacagcagttttcagctccaccggattcatgtccacaggaggaagatgcagttccaggcgctgaaagaggcggtgggggcatcgtcctggccgagctgggcgataggagattgaggcgtggctgctttttaggactgggattaacgctatttgtctggctggagaaatcctcaggacgagcgcgcattatgcgacgagtggcggagccagaggcaggtggaacattctccttgcccacgcgcggtgagctaaccagagattcgctctctgagaagatgcgcatttccggctcttcgcggtcgaaattgagacctagctcggaaagctcccgcgacggacatgtcgtcatgtgacccctttgcggtgactgcagtaaatcgaagtacgagtcatgcgagacgctcctcgaatgaccaacagtgcgcaggctatcaattgaattggagcgtatgcacaggtccattggtttcggatcacgttcattgctcgttgtctccaggagttcaatagatttaggcttgtcatgcttggtcagttccttgctagcatgagcatgtgatgcctgcacaaagctcacgcgggaagcaacggaatccttgacatctgtggttattttctggccaggatcgggattaccctgtcgctgactgcgggagaaaatcgacttccaagacggcgtcttgtccggcttacgtttctgccagctgcgcggggccgacagcaccgtgtggtatttatccggcaagctggatggaccaccgcccacttcgatgtaggagccaatgttggaggcagcgttgctactagcgctggtcaacatgctaatgggcagcgactgcttgaggtcagccccctccactcgcgaatgcctttcctgggcctcctccaggcttatcagtttggctccaccggtgctcagactctttggccgttccaccacgcccaaagattgatcttgctcccgctgctccactagcagactttcgcagtcggtaagtgactccaggcgtagctcaccaccagccgcattcgcagcagcagccgtagcactcgccaccatgctgtgtcgcgccggatgatcgtccagagcgtcgaagatgttatggcaattccgtatcaggtactcggtgaccaccgcctgcacgccaacgccacgcagagcagccacgccccccgattccagggcaggtgagcgcagtaaatttggcgcccaaacaatggccagattcttgtccgtcattccggtgcgaccgtggtgttgtgacaccttgtacaagtgctcggccagatattttagggtcctgcacggaatataagaccatgttaatataaattttgccgatttatccgagattttaattactcaccgatagtgtggcggaggcagcttgagcaccgtctccttcataagtcgcagccgctcgtccgcctcgtcggccttcacttggatggcctctacaaagttgtcgtacagttggtaggtgcacaggggatttggaagctcgcggaagtacatcttgagcagcgaacttactgcatggatatcctgcttcatttcagggttacccaaatccggtacacgctcctcatcgaaggcgcgccttagccgctggatgttggaggtgatgccggaaagacggtaaattccatctataacgccatagttttcgatgaactccgcacaggatcggagaaccatgggtatgtcctgaccgctgttcagcagatgctcggacaggtcacagttaaagacgcgttcgcggtaaattccactttgttttaggcgccgacgtgatggtcgcgacaggataaaggaacggaagaaggcgatcagtttgccgtgcttacgcagcaccggcttagtgggtgaagcatccaagtgaccaactagcggtgctggcattggaaaattcctgggcaccttatcgccgatagtggccacacaggattgagggaaaaaacccacttcgtagagggacttctgcagatgcgacttcttgccgcgccaccaaatcgactccgccggactgggcatgtcgatcacggaaatcatgtcgcccacctcaatgttgatctcgtccggagcttgggcctgataacgcctcactccgtaggcggcacccaccgcaggtgtgttgatagtcctctgtgtctcaccatccgccagcggtagtcgcctgcccttattgtccagctgtagccaggtcagaattgtgccgcaggtcagtgaatcggaggcgatcttcgagaaacgctccaggtacttggccaccgcatattccacatccgattcgctgggcagctcggccgccagttcctccatgttgcgcagtccactaattttccggtcgtatacgcaccggtggagcatctcgtccagcagttgcatgttctcgaagctccgcttgatcaggaacggttcgcagcgctgtgggcacacgcggatgataaaccaacagctctccggagaaaagctgcgcagcgaactgtgtggtaaatcaccgccaagagattgggaagcaatactgctgcccatgtgctccgacttgtcatctaacagctgcacggataacggacccagctggaccctttcgtagtggaagtgggcgcactcctctagcttgggaaatcggcacgatttctatggacgaaaagtaagataagactttggtgaattgaatcggctcactacttacgctattcagcggctgtacggccatgtgacgactgggctttggaggcggtacagcgccctggatgggcggactgcagctggactccgtggaggcattggagatttgtgatgtattcatggaggcgaacatgtcctgataactcaggcctggcaaactgtcagcgggcacgattttgaagtttagctgggcactgatggcggccgccggagcatccatttcaaactggagcggtggagcctgggcatccttatccgtgctggcatggcaggcaattgggccaccgttcactccaccaataccacctgcttccgccgacgccagggcatgggaatgcagctgggctgccaaggatgtgctcaccttgtccgacatgatggatcgatcactctacgccagttgcgacatctgaaagaagcggggaatttagattcagatttagtgaatgcattctcagtgcttaactctttaggccttcagtggccgagaacccacgcgataaataacaatgcgaaggctgcaattcttcccacaagtctacaagtctacaatttaccatgcccatcattactattccgtttccaggcctttcaaatccatttgcataaacaatttgcagactttatatagtcacgttaaagttggtaaatggtagactcaagtcttaggaatatcttacgtacatgcatcaaatggtatatattatgatacccaattttaaacaaatgttctctttcttttctaactagctatttgggacatgactacctgtttttagaatcttggcgatctcattccgaaatctaaagcttgaatccggatcccatgccgtccccaatgtttcactttcgtatgatccacttccagcctagaatttcccaccccaaatggagtctcatttggctgaaagtgcccaaaagctaaattaaacattccggcctcgtttatcggcgtttactttctaatggcacgcgcgatcttttcatcagccaagcgagcgacctggagtctcgccaggccaaatgttctactttcggggctaaaaagctgtactctctctgtcgccgatgtggatttttcccgacttggcggtggaataaataaggtcactggctcagacaaccggcaggatgtggcacacgtaggggtatggttcgactcaataaatatatacaataaatatttataaagttcaaaccagttggggaccgaatggtcggtcggtcgaatgggattcggattcgaattgcgattcgaagtggaggagatgtggatgtggatgaggatgcgatgaaatgggttgggatgggatgcctagcggtggttctgatttacaggcgacacaaatgcaatgcaatcgccgccaggctgcagcatttaaactttcataaattaagccaacagcggacaactttggacgaagcgaaaccattcgagaggagcatggggtacgtagttgggggaaaacgggtttttccactcgcctaggaggaaaactcgagagcctgctggggccgtccatcacttgcggccaaagcgcagctaaactattaaaaattgttaacgctaacggtctcaaaatgcagtcgcataaagaaagagcagcgacagattgacagaaaatgtaaagtgcatctaaaatcgggtaaaacaaaacataaaaaccatatgccaacgacctgggaaaatggatacaaacgtgttacaaaagatcgaatcgatgtcatcaatcgaacgatcgtgtgattaagtgccacccaacaatggtgaatgaatgggtgagataataacactccactccacgtaaccgcaatcttttagctttcccgacgtattcttatgaattaattagggttcttttattgttaagtctgtggttctcccattgtcagtatctaaagaattctttttggtcagcacgttctgctgatatgagccgtatgattttgtttttgacgatgtatacatacattgggaaatgcaaatcagctaccgggatttattgtttaaactcacattcaaacatatctggccataaaagcagtatgcattctgatcggttttacatattttacaagtatttaaagtaaaaaaaaaaaaccatataaacggctttatgttgggcaattgaaatcattaatgattttgtgataaaaattatcatacatgattaggccgacagacattgaaggctagtcgaacgcacaaaatcaaatgagtttcatctcaattatgcacaaaagtcaaaaacaaaacaccaaataaattttcgaactctgtgcatattcaattccttgattgcccattgcactttggccaaaaacgagcccaatgaagacattttcccatcggtttctttcgcccagctcactttctccaatcaattaaacaacattgtctatgtccggactgcgagccgccaaactccggagtttgtgagagcagcaaacatttcaatcgctgtgcaagaggctcgggccaatttaatgctatgaaataacttaatattggacaatagttaatggttttttaatggcgggctggcggcttcaggctgcgttttccacctcagctcggccggggcttgacccaattgacttgcagcgagaaaccgaaagccaaacatgacaatgatctataaatcaagactggaatcgcaagtgcgtgagtctggagcccaactagacagcatggacacacgtttatatacgtatataataagctaaataaaacttgcccctcttgactgttgttggttgtgctaatttatggcccaaagtgggtcactcactcactggtttctagagcggacaattgcagcgaatgatgtcggttgtcggccataaaagacttacgaggctgcaaatgcatgcataatgtgcttaagcctagttgctgagactgccagtcagttaggcagttcccccctccgttcgacattcactcattcagtcagtcagccagtcactcattcacttcagccggcaagtgctaaacgatgctggtgtgcatctgaatgaggcggatacgctgacggacaattaaatagatccgcgacggttaatcacaggaaaattccagggtagaggactagaatggatagagtgcttttactggccaaaacgacttaggcacttcgaatttctatagttgctattatactattaaaataccaccgactagtttaaacttcaaatttcttgtttccacttttcaaaacatttttaaattgtaattttggatttcgatttctgtacaatgtttttaatgccaaaccccattttcaggactaactaatgattaagagcaatgacgacgacccatctagattgctcgatgactctttttagctttgactcactttaaatagtcacagtaggggcggctaattgctcttggcagattcgcattacataacctaataatgtatccagacgtttggtaccggtaccaagtaaatcgaaagccatttcaccgcagacacatagatttggaccgagtgactaatgggccaacatgaagtcattagactggccaattgatgccagatagtcagccagtcagccagtgctcctataaaccatgcagcatgaacaaattgcagcccaaggctgatccggttgctatatgccgttaatctgttgagcagagcggtatcaatctacgccccagttgacagccagtggcacttgtgctcttggaaatctgatcggtttggcccgcctggctgactcacatgtcggatttgtttacgaatggggagccctttgtggggtcgtctgctcccaaatcaatggcacacaaccccactgtccccccacagctgactgactgactcataatatagaaataaaaaagcaagtccgccatgtgggaattgcaattagtctaaccgccacattagtcaacgctcgtgcttcggactgcccaagtccgttttactaattttacctgggcaacggaccaaactttacactccactcccatggcccccataattgtcgagctctcgacttccgttcacacaattatggactgtggcaaacacaaatgccaagttgcaagttagggaaatggaaatggaaatggtttgcctggttcaagaagtttgaatgcgctaatattacatattacatgaacatatccagtaagcaaagtgcattttattacgctttatctgattcttaaatagttcaaagtaaatcttatacatttcccaattggtttcagtcccattccgaaatgattccgactctattatgtggcgattgcataattccgaaatgtaccagcagcgaatttccaaagtcattaaagtgccattgttagggcattaaaagcgttcatctgatatgaagaaaaaaaatgggaaagcacagggcagaaaagaaaagcgaaatcgctcaattccgctggccatgtaaattttctactttgacatttgtgcagaatttcgcctggcctggcccaaaaccaactcatctccgtcagcgaaccataaaacctagcctagtgtcatttagcgacgtcgaaaaacaggtacacataaacccacggactcacactccgacgactatcggcgagaccagactttatatttttaatggaagtgaaagttttgcgcgcatcaacgaaatatatatatatgtacatatgtagatatatagctgctatacgtagacaaagccaaacacacacgcggccggcaatatccaaattttttctttcaggttgtcttaggctcgtggcgccggcatacgaaaagttttgaaaataaacaagcaaaataaaatcgtacaataaaaatcgcattaacaaatatgcgaagcagctgctggaagaaagcgcaatggccaaatatttagaagcaaacgtcagacgcaaacgggcagtggcaatataatttaattattattcatttctatgcgagcgcgaccgacccgagtggccgtgcatatgaattgttaaataaagtgttgaatttcaataagacaaacggccacagcgaacgggggcaattggcacaagcgttgaaattcataaacaaatgcgaaaacatacacaaaatataaccctccccccctccattcgaaacttgttcgtattaatagacaatcgtttactctacccatcgccgggcatatgagctagggggttgatctccgctcgactgcggaatccttcagaggaatttggtatttcgaagtgctattcttaaagttctattcctgaaagaggcgatccgtacaaattgtttaaggtttggtttctctaaaaatagagaataaaagaagataccgcaaaacttaaactttattctgcatatactattctatttcaattcattgtgcactaaatacaatgcaataaattcaagcgtttgctttccaaatttgctacttcgccttttgttctatactgcacaaaagtggtaattagaaatgataaattacacatgttcaattaaaactattcgagctataaatattcaaataaggcaacattccattcactggatttgtgcaggtgattcatggatgaattataggttgataaaaattattctgtctcactgatgatgagtcagaacgaaaggggactttcttcttatctgaggcttggattaaatgcttaaaaaacttaaaaacttatcaaaaactaaggtaaatcatttacagcattcatgtttccagtgatcggagatcatgcaaattaaactgaggaatcggttattgaacacatttcgtaatctatatttaaactatgaaatcatcgaactcaatatatgcacagtaaatgtcaataaaagatagagcatctatatttatttgccttcgacactcttgggctatgatttcctataatgtaactcttctttcaaacgtattgaatagaacgaattcttagcgcatttcacattcgacgcagctcatcgggcaaacagagggcactacttttgaggcattttgatggtttttgtttcatatgacttggcactaacaaccataacagcagcagcaacaacaacaaagcccccagcgacttgtcagttttaattgaaatcaattgagctcaattatttgatacgcatatgaaacacaacatcagcggccatcacaacaacagccgcaagagccgccaacccaaaaattcttatacgccgtgtgggttcggcatttccccctgcttgcacttcaataaccacgagatagttggcgaggctgggggcatgtcagtcgccaaatatggagcgtttatgaagaattctttacatgaatgtaaacaaaaacaaaatgcgaatataaaacgcgacggcgtcggctcgaacaggtgtaaacagcaataagacacagggcgaaatgtgtagaacagcgaattttctgttggcagtttcgctgcaatgttttttttgtgcctgctattgtagactgtttacattggccagcaaaacagtggttggtaatcagtaatcagtgataacggctgcaatttagtactattagtaatccataggtatgaaaagtcttgcatgaactggaccgaactccaaatgttagttagttctcggtagcaatactgtgcaagccagtgtaattcttatccctacgctgcctgaagaggggaatgcgaaattccttctgtggtactagtgcaaaagtaagtagtccaggaaccaaggcgttgcagcccagtgtagccccccagtacgcccagatgtttggtgtcacccggttgaagggtactcccttcccggatgggaaagggttttgctggcgggattgggtatgggaatctgccgcatctgtgggcagtggtgtaatgagctggtcgccggcgaggtaaacgttccccattggaagcggtgtgagctagccgtccgtttgagcggatgtttgagttgagtgcacagctaccgaggcgcaacgaaattaatcgaactcgaaatcgggagctggcggggaagcagcttgctcgcttggttatgctgctgcacatatagtacccctgtatataatacatatatatgtatgtatgttcgtgtatatagacgtagagtagatgtatctggccaacttgacacgtttctgcaacaggcggccgcagcgcagtcaactttgctctcgtcactcgaaatgtgccataatcgtgcgcagtcgcggcgcgaatctttcccagagacgtgagccacataataaccgcagtaggagccccacacgagtgtacatatgtacataaagtatagtagcacatatctgtacgtatctcgtaataatagcgagaaagctgcccgcacccagcccccgcatttaacggccaaaatgagtcaacatgcgcccaaaatgttctcatagaacagtggggagaagtttgctgatgcggagggataggcaatgggttctctttttaagccattttccacatcacacatcacttcgcataaatacccattgggaatgaacgagaactaggaaggtacatatgaagatagttcagataatatttagacagctttaattatattcattatagaactatgaagaacataaatcaactataattcagggtctctacgaacgcaactaaagtttacacactgcagctcagtagagtagaaaagtgaaatgaagtaccacctatcaattaacaatcagtctacgccaaatagtatttgttaattgatttttccgcctccttaacaccttttcgttaatcgcacacttcgctcctttcacaaaactcttggctttactcgcagaagggtatgaaggaaagcaagtgaaaggccaggagttggctttttgggaaagtaacagagcggaccaaaagtatcagttgcttggcagagtgggtggggtaggttggttttggggcacgaggagctggagaagcaggagcagccggacggagcgagttcaatgtcaactgtgtgggcagcgccacgaaaacttttttacgagcgcttccgcttgaagaaacacacacaactggatgtgtgtaagcccgcaagtaaagcacgaccacacctaaacattaaaaaccagcgatggaagtacatgtttcctcctttcggcgtggacaaaaacaaagagacacaagcgaccatacagcgggggtcaactctttaaagtcgtgttgagatttttttaagatcatgtgtaatcttaggttttaggtcaatggcttgtaaactacactttatgtgacttaattagcgtttagtgtttctcacaatttaagtcttgctgtgcgtaatacccgaggattgaaaacaaaaggttaaggaatgtagttatcccaaagggttgattgcgatgagtcaaatgacagcagctggcatgagttgctctatagctattactattaaattccagaataggagcatataagaaatacaaaagtttcaaagtgaacaacataaaccaagttctagtcacggtcaagtgaggaactctatttatagttatagggtttcaaaatgcacgtttccttatctgggtttttggggttgaagttgcaggacaaaagacggcagctttggaggaatgcttttgtccgctcttcctcttcctcgcttaccaaggactccataaagacggcagataccggaggcccattactattattttgactgcagctgtacgaaagagaggcattgccaatggggtggaatgtgcatgtgagtgtgaatgtgttaaggaaaagcagcagcagacagacagacagacagacacacagacgaatggacatatggtggagttgtcccaggtgagagtgtgtgtgtgagtgtggctgccacagggtgacaaagtctagtgtgaaacggacatatcgcacttatgtcttttacataccaactgttccaatagcaaggcgcaggcatagttacgtgcgcgagacagagagggaaacacacactcagcttccttcgcaaaaaataatatgggagagcgaaaaaaaataacagaaaagacggggcgttattcgctgttattcggcacagaacgcgtctcgaacgatgatgggaaaatggtaaaacaatggctttggcacaattaaaagacctcaaagacgccaaacggttattcgtttatgttttcatctcttcctctccctcaccaatcagcagtcgcagtcgcggcagctattatttattattttcgttgctgccgcacaatacactgacacacatttttaaatagagaggagatacttttcagcatatctttttcctttggcacgcacacgagcatgcagacacacgcacacgcaagggcataccgcacacacacacacgtacgctagcagacggcgggtgtgtaagcccaattttcgcattcgtacacaccttttctcgaatagatcaccgtggcaatggcaatattacaacatttctcactgtccgtcccagtgcacaattaactggcttccgatccgcagccttttacaacgcgacaacaaatgtgacgataacgattaaaataccaccggccttattataacgcactatttaataccactgcacatacaagaaataccaaatacaaatacctagcaattaaaaactactttggtatttaaattagttggaaattaaataagtatgctacatattaattatattagccttttagttttaggaaactctatgagttaaagaaagtatccaattatcgatatattgcctgaaatactacctacactgcttgcttgctatgttaatacagttcaaaacagaccgatggtattttctacctaacagcaagcagtcacatcgccacaaaaacataaacaaataaaacgatttgaagatgaatccgctaacaaatatgaaaaatgtgctcaaactgagcgaacacgaactgcaacatggcggaaagaagagctggcacgacatgtacaaggactcagcctggattttcgtcgcaggatttccgtataccctaactgagggcgacttggtttgcgtattctcgcagtacggcgaagtggtcaacatcaatctaattcgagattcaaaaacgggaaagtccaaggtaatgcttagttaccctttcaagaaagttcctgaaatcattgtttaaacttgtccagggcttctgcttcctgtgctacgaggaccagagatccacagtgctggccgtggacaacctgaatggcatcaagatcctcgataggacactaagggtcgatcacgtggccgactacaagcctcccaaggaaaacgagaagatggacgaggaaacccttcgcctttacatggagggctgtgcgccgaaacctcaacttcagcacatcaagactgagaagaaagacagcaaaaattatagatgataagataaggttagcttaaacatagcaaagcatgcaaacagaatttttatattaacttaaattttttagttattaaacgctaaattatactactacattcttttttaaagccagtaatttaaggtgcaagaatgaattggctttccaacct

SEQ ID NO: 42656 - DNA, 5591 bp, DROSOPHILA
gtattttaatcgttatcgtcacatttgttgtcgcgttgtaaaaggctgcggatcggaagccagttaattgtgcactgggacggacagtgagaaatgttgtaatattgccattgccacggtgatctattcgagaaaagatgtcggacaaggtgagcacatccttggcagcccagctgcattcccatgccctggcgtcggcggaagcaggtggtattggtggagtgaacggtggcccaattgcctgccatgccagcacggataaggatgcccaggctccaccgctccagtttgaaatggatgctccggcggccgccatcagtgcccagctaaacttcaaaatcgtgcccgctgacagtttgccaggcctgagttatcaggacatgttcgcctccatgaatacatcacaaatctccaatgcctccacggagtccagctgcagtccgcccatccagggcgctgtaccgcctccaaagcccagtcgtcacatggccgtacagccgctgaatagcaaatcgtgccgatttcccaagctagaggagtgcgcccacttccactacgaaagggtccagctgggtccgttatccgtgcagctgttagatgacaagtcggagcacatgggcagcagtattgcttcccaatctcttggcggtgatttaccacacagttcgctgcgcagcttttctccggagagctgttggtttatcatccgcgtgtgcccacagcgctgcgaaccgttcctgatcaagcggagcttcgagaacatgcaactgctggacgagatgctccaccggtgcgtatacgaccggaaaattagtggactgcgcaacatggaggaactggcggccgagctgcccagcgaatcggatgtggaatatgcggtggccaagtacctggagcgtttctcgaagatcgcctccgattcactgacctgcggcacaattctgacctggctacagctggacaataagggcaggcgactaccgctggcggatggtgagacacagaggactatcaacacacctgcggtgggtgccgcctacggagtgaggcgttatcaggcccaagctccggacgagatcaacattgaggtgggcgacatgatttccgtgatcgacatgcccagtccggcggagtcgatttggtggcgcggcaagaagtcgcatctgcagaagtccctctacgaagtgggttttttccctcaatcctgtgtggccactatcggcgataaggtgcccaggaattttccaatgccagcaccgctagttggtcacttggatgcttcacccactaagccggtgctgcgtaagcacggcaaactgatcgccttcttccgttcctttatcctgtcgcgaccatcacgtcggcgcctaaaacaaagtggaatttaccgcgaacgcgtctttaactgtgacctgtccgagcatctgctgaacagcggtcaggacatacccatggttctccgatcctgtgcggagttcatcgaaaactatggcgttatagatggaatttaccgtctttccggcatcacctccaacatccagcggctaaggcgcgccttcgatgaggagcgtgtaccggatttgggtaaccctgaaatgaagcaggatatccatgcagtaagttcgctgctcaagatgtacttccgcgagcttccaaatcccctgtgcacctaccaactgtacgacaactttgtagaggccatccaagtgaaggccgacgaggcggacgagcggctgcgacttatgaaggagacggtgctcaagctgcctccgccacactatcggaccctaaaatatctggccgagcacttgtacaaggtgtcacaacaccacggtcgcaccggaatgacggacaagaatctggccattgtttgggcgccaaatttactgcgctcacctgccctggaatcggggggcgtggctgctctgcgtggcgttggcgtgcaggcggtggtcaccgagtacctgatacggaattgccataacatcttcgacgctctggacgatcatccggcgcgacacagcatggtggcgagtgctacggctgctgctgcgaatgcggctggtggtgagctacgcctggagtcacttaccgactgcgaaagtctgctagtggagcagcgggagcaagatcaatctttgggcgtggtggaacggccaaagagtctgagcaccggtggagccaaactgataagcctggaggaggcccaggaaaggcattcgcgagtggagggggctgacctcaagcagtcgctgcccattagcatgttgaccagcgctagtagcaacgctgcctccaacattggctcctacatcgaagtgggcggtggtccatccagcttgccggataaataccacacggtgctgtcggccccgcgcagctggcagaaacgtaagccggacaagacgccgtcttggaagtcgattttctcccgcagtcagcgacagggtaatcccgatcctggccagaaaataaccacagatgtcaaggattccgttgcttcccgcgtgagctttgtgcaggcatcacatgctcatgctagcaaggaactgaccaagcatgacaagcctaaatctattgaactcctggagacaacgagcaatgaacgtgatccgaaaccaatggacctgtgcatacgctccaattcaattgatagcctgcgcactgttggtcattcgaggagcgtctcgcatgactcgtacttcgatttactgcagtcaccgcaaaggggtcacatgacgacatgtccgtcgcgggagctttccgagctaggtctcaatttcgaccgcgaagagccggaaatgcgcatcttctcagagagcgaatctctggttagctcaccgcgcgtgggcaaggagaatgttccacctgcctctggctccgccactcgtcgcataatgcgcgctcgtcctgaggatttctccagccagacaaatagcgttaatcccagtcctaaaaagcagccacgcctcaatctcctatcgcccagctcggccaggacgatgcccccaccgcctctttcagcgcctggaactgcatcttcctcctgtggacatgaatccggtggagctgaaaactgctgtaagcgatacaagctggaagatcagttgtgtgacattcagttcattgactgtggaactcccgaaaatgtgcccaccactcaacagcagttcgccagtgttgaagtgcacccgccaccaaagccagctagggcaaaccaatctcccatatcgtcgtcgaatggtgcatctgtaggctcctcctcctcgtcgacccgctacagctatccgtctgtgcagctgggggccaaacggaaagaacagcaggatgctaaggagcgtttcagctaccagggaacctttacgcagccaggacagaaacaggaatcttcagctccaagacctgtgcataccaacaacggtgctactctacgaaaacctcgagtggaacccgtcgaagatggtcagatcaagctgcatgtgcctacgcctacaacacctgcccgcagtccccggtactccttgttgttgtgcgacaccgaaagctccgataacagttcggcggtaaatacaccgcaatatgacatggagccccttatgctgacatcggccatgtctggcgtatccggtgtttcatccaatgtacagcagcagcagctgcttttaggtgtggatgcgtccagcagttacctaggcagctcgcacgagagcttgggacagaacatcaacaaccaccatgatgctgagcagcgtgatatgaatgccctaaaaagggagctatccttggaccttaacccactgcagccgcgcttaccacagcccgcaaatcgagctgccactttaccggttaaagatcagctgcaggctgctgcagcggccatgtgctcatcgcccaacaattccaattttacggacaatactagtcagtcagtgacaccgagcgagtatggttatcagcacttgcagcgacagctaagcatgcactctctgctggcgactgatgagagttcgcccgtgtacgaggacttcgaacagacccccgtcaagatggtgcccagccccataaaatccaccattagcatcacatacaagtcgcccgagaaggaaaagaaaccttcggccatcttagagaccaacttcgatgaaaacactgtatatgagcaggtgaagctgttccggaactcggtaaccgaggttaatcaaatgttacatgagcgttcaagcctgaaacagattgccgaggaggagcagcacgatggaggtgcttacaaggcagcagagatgacgcagcaactgctgcagcttgaacaggagcaccacgaccacgaagagcagcaggagaaagagcctgaggatgaggagcaatcccagctactttacgaaaacattgagctacgcaaaccgaaaacagtttacgaaaatctacgtggcgaggagatgaaattcattacagaagaacagaaacccaacgttgatagaattgagcttgatagtttagacagcttgccagacaacatggaacacgaacagtcgtcgcccagcaaatcgcccactttcagtgtcaaggagttggccaacaaattcgagagctcgcctgtggagcagctgcccaactttgatttttcggtgcgtggcggctcgatgaagaaacctaacgaactgagcgtacccaagacgatgcccgcacccgtgccactcaagaaactgaacagcagtgcccaaaaaataacccgctcgttggatgagaacgccttcgtcagagagtttgggggcaagcaactacaagatctgtctctctctaacaaactgcccgaagtaatgtcagaggtcaacagccggcgcaagagctttgacttcacgcgacctaaaaccttgaatccaccaaagcggttgcctggtatgagcattaccgaggagatatgccagaagcgtgttggcgaaatggaggcaattacccccaccaccgagaaccgcatctcactcatccagcagaataatatgcccaaagagcagcaatcgtcggctaatcagttcctgcccccggcgggtcgaaagaacgtattaacaggcgtggtcttggatcgtgagcgcatcgacaaaatcaaggaggagcggcgtcagcagctaacgcaaaagtactacggcgatactctcaagtctcggtcgcgtacggaactgaactctgaagacaacttcccggctgcagaatccctgcgaatcaagtccaagtcacgcggcgatatgcatgccttgcaaaaggatatcgacatgaacctaaagcaactgagccgcgtcactggcggcggatcggagtgcaccctccacacgggcttgagccagggtaacggacaggagcatctgggacaacagcgcgtgcgccggatttccgacgaaaagaaccaaaattgtgataccagtaatggtggcgtaagtggcataacctccacttcgctactcagcgtcaagacgacggcccagaaatatggaagcaccagcaagacgccagcgaataaatttgaacgtagtcagcccatgccacgcgatcgcttgcagaggaactccttggccgagagcaatgcaggcaccaagtaa

SEQ ID NO: 42657 - protein, 1817 aa, DROSOPHILA
MSDKVSTSLAAQLHSHALASAEAGGIGGVNGGPIACHASTDKDAQAPPLQFEMDAPAAAISAQLNFKIVPADSLPGLSYQDMFASMNTSQISNASTESSCSPPIQGAVPPPKPSRHMAVQPLNSKSCRFPKLEECAHFHYERVQLGPLSVQLLDDKSEHMGSSIASQSLGGDLPHSSLRSFSPESCWFIIRVCPQRCEPFLIKRSFENMQLLDEMLHRCVYDRKISGLRNMEELAAELPSESDVEYAVAKYLERFSKIASDSLTCGTILTWLQLDNKGRRLPLADGETQRTINTPAVGAAYGVRRYQAQAPDEINIEVGDMISVIDMPSPAESIWWRGKKSHLQKSLYEVGFFPQSCVATIGDKVPRNFPMPAPLVGHLDASPTKPVLRKHGKLIAFFRSFILSRPSRRRLKQSGIYRERVFNCDLSEHLLNSGQDIPMVLRSCAEFIENYGVIDGIYRLSGITSNIQRLRRAFDEERVPDLGNPEMKQDIHAVSSLLKMYFRELPNPLCTYQLYDNFVEAIQVKADEADERLRLMKETVLKLPPPHYRTLKYLAEHLYKVSQHHGRTGMTDKNLAIVWAPNLLRSPALESGGVAALRGVGVQAVVTEYLIRNCHNIFDALDDHPARHSMVASATAAAANAAGGELRLESLTDCESLLVEQREQDQSLGVVERPKSLSTGGAKLISLEEAQERHSRVEGADLKQSLPISMLTSASSNAASNIGSYIEVGGGPSSLPDKYHTVLSAPRSWQKRKPDKTPSWKSIFSRSQRQGNPDPGQKITTDVKDSVASRVSFVQASHAHASKELTKHDKPKSIELLETTSNERDPKPMDLCIRSNSIDSLRTVGHSRSVSHDSYFDLLQSPQRGHMTTCPSRELSELGLNFDREEPEMRIFSESESLVSSPRVGKENVPPASGSATRRIMRARPEDFSSQTNSVNPSPKKQPRLNLLSPSSARTMPPPPLSAPGTASSSCGHESGGAENCCKRYKLEDQLCDIQFIDCGTPENVPTTQQQFASVEVHPPPKPARANQSPISSSNGASVGSSSSSTRYSYPSVQLGAKRKEQQDAKERFSYQGTFTQPGQKQESSAPRPVHTNNGATLRKPRVEPVEDGQIKLHVPTPTTPARSPRYSLLLCDTESSDNSSAVNTPQYDMEPLMLTSAMSGVSGVSSNVQQQQLLLGVDASSSYLGSSHESLGQNINNHHDAEQRDMNALKRELSLDLNPLQPRLPQPANRAATLPVKDQLQAAAAAMCSSPNNSNFTDNTSQSVTPSEYGYQHLQRQLSMHSLLATDESSPVYEDFEQTPVKMVPSPIKSTISITYKSPEKEKKPSAILETNFDENTVYEQVKLFRNSVTEVNQMLHERSSLKQIAEEEQHDGGAYKAAEMTQQLLQLEQEHHDHEEQQEKEPEDEEQSQLLYENIELRKPKTVYENLRGEEMKFITEEQKPNVDRIELDSLDSLPDNMEHEQSSPSKSPTFSVKELANKFESSPVEQLPNFDFSVRGGSMKKPNELSVPKTMPAPVPLKKLNSSAQKITRSLDENAFVREFGGKQLQDLSLSNKLPEVMSEVNSRRKSFDFTRPKTLNPPKRLPGMSITEEICQKRVGEMEAITPTTENRISLIQQNNMPKEQQSSANQFLPPAGRKNVLTGVVLDRERIDKIKEERRQQLTQKYYGDTLKSRSRTELNSEDNFPAAESLRIKSKSRGDMHALQKDIDMNLKQLSRVTGGGSECTLHTGLSQGNGQEHLGQQRVRRISDEKNQNCDTSNGGVSGITSTSLLSVKTTAQKYGSTSKTPANKFERSQPMPRDRLQRNSLAESNAGTK

SEQ ID NO: 42658 - DNA, 4101 bp, DROSOPHILA
tttttcgagagcattcctgctaacccgtaattaccaatcaatttgaaacatttaacttttacctcctcactctattccgcacttgacaatgggtgtctcactaaaatggctgtctgaaaacccgcaattattttgccattgttaagtgcatttccatccaccccgattcaatccaatcccacccgcttccgcccgcccacttgggcggcaggacatgcgcagggcgtggcagtcgccaaccccatacatcagtattcccgctgcttaaccatattagttgctactttgtgttgtcaattggatttgattgcccggcgagggggcgggcatcaagctacaccacccacccacccagtaacacttctccagcattcgcgtaattcgctccgttccgtttattgtaagcactatgttctggataagaagtcgcagggaactaatgtatcttaaaatggaagttctcgaatacaatcactaaatttgattagttattagacttaatacatgactagaaaactcgttcaagaactcgttggtatttacacggcttttcgattcaattcaaatatgtatctggggggaaatacaactataattatagcaaaataaatatgtttcttttggacaagatcaaaacagctagagtagctggatggtatctgttataatcaatcaattaattcaatggtgaaactgatgggtaagtttccacaattataaggaactatagttcgtactaaatcgtaataatagatattttcaaaatggtataaccatgctcgcgctgataatatatgtgttgttttgtaacttctgtgcttgtctaatagaaaagtcatttagtaaaagaaactgatattttttgatttgaaaatctcttttagttgtatttcccccaactgaaacaccgaaaactttactactttaggatccaggtccacatcccgatcgaactgtctatgttaactggtagagtttcgcatcgccgacgatgtccacgtcgctggagttgtcctcgtcgccactgtccgcctccagatcggagtagtcatccgtggagtaaccctgctgcatcaggcacatctgcagctgctgctcgctcgtcggctgagtgggtgtgccgccgacagatccgggattcagtttgccgtgcttggagtccccggatgaggaggtggcctcgcccggctgcttgcccggttcgctgcgtgagaagtcgacgggctctgcggcatggaagagtcaaagaaatttccacaaaatttagaactaatttgatttgcgttgaaacttgagcaaaactttttgcatcacaaggagccggctaaaagccaaaaggtctaattgatagtccaaaagttcctcaaagaaactactcactccagtggtctagtttttggtgctttgtgaccaatttgaaaaccgctgaccactcctgctcgaaatgccttttgacaatttaattgctaactcaaatattgcattgtctaaaagctggaaaacttgagcaactctttttcgctctagttgttcttaacagcccagaaaaggtttgaatattaaataacttgatttgagtattataaatttcgtaatatttaatttgctcataataaatttgtgattatgaaatcaatatactcaccattggcattgtcgcgccggcgcagctgctttttgtgcttcatgcggcggttctggaaccaggtcttcacctgcgtctcgctgagtcccaaggcggtggccagctccacacgctccggcgtggacaggtatcgctgtccctcgaaccgcttttccagaccggacagctgcggatcactgaacaccgtgcgagccttcctccggcggcagtggcgcagggcattcacgcccattcccagtccgagggccagttccggcacacagccaggcgctccgaagaagggcgctcccccgaacaggctggctgaaagggcaaaggatgcaaaatttggttaacttcgttatagttggaacaaatgaaaactttcggtgttgatggccatttacaccgaatatttcgagttttagtgcccctaaatgaagctatgtggcaacaaaaaactgcacttcaacatcagttgtcctactaatttgggtttcattttgaaaaagttctaaatgtgaaattaaatgttgtgctggctttttaatgagaatatgtccaacttcattttcgattagctaaactctagctagaattgacttttaatttctatgagttcgactttaacttattaccaacatgtttgtatgtaccagtacaaatcagaatcatctaggaggatatctctgtaatatcgagcattaactcaccttgtgatagaaaatagggatccacggacttgtaggtgcccgacgacggcgagagatatccgagggtcatttgaagaaatccgtgatcggtgtagggtgcattcggatagagtactccattggatgcaccactacctccattcaggggcggcggaggcggaggttgaggttgagtcgtgggcaccggcggatgttgtgctgctccagatcccaactgctgcgaaatctgatctccgttgtagtgggaagttccgtgtcgcgagtggtggttggacctacgaagcaagtggttcaattaggggtctattggtatttcgatgttaaactattctctttatgtccaatagtgatttttatgctaatatgcttaaatacaaatatatattcccagatacattaagctttatggtaagcctgatttctatgtttccaaaatatcatttttcttacaaaaaatattctataatttaaaagaacataatccaaagtaagattttaaaggtgtatgctattccaaaatatttgtcttcaagaaggtgtgactatctatcgtatttgatgtttcatgtttacttcttattcttttataaattcactttgttaatattatcttattttttatttattttttttttattttaattactttttttcacttttctatgcaattatattggcttaaaattaaagttttttaaactaaaatttcactgcagtagtattaggccttggaattcggaaaccaaccgtggagtgctgtgcatggacttgccgtaatcctcgccagcgtaacccgacgcagcctggttgctgcgggcagtagccgtcgcggatgcggatgcggacgccggcggatgtgactgcggcggatgcgaatgttgcgacggatgtttgtgcggattattgtcgtgggcaaatgcgcttctggcacttttcaccgcgtttctgctgctctttggcgcgtagttgttggtgtttgcggcgatgccgttggtatcactactattattgttattgctggcactatttaagttttgaaacaatatgtgctcgatggaaaacggcgtttttgtggtcagcattgtggtggcactggccatcgccgccgccttgctgtgcgtgggcgtggtggcgttggcatgagcatgtgcgtccgcaggactcaagctggcctcattaagcattgccattgcgctggaggatggccgagcaggaggagcacgaggagcagtgatggagaccggagccaggagatgtgccagccagccgggatatatacgtgtccttggaccgcgcgcgcgcttatgttgtttgctcgttgacggtcgcgttgagtttgcggcaatcaccgcacatcaaccagcaaattgctctaaacgagctgccagcagacatgtgcgagcgagccggcgatatggtcctgcatcctgcgaaaaggggaaaatcgaagggggggaaaaaatgcgagcgcaggcagtgccaccccctcctcaatccggctgcagttggcccgctttgcggtgcccgcttagagcggcaatattcggggaatccccgtaagcgggcacatgaacacacccctcgatttgcatgcgcatagggttgtcctgctctggcaggattttgagcacccatctctctgctggcatccactggacatgcgattagtgcggaaaaaccttagtttaattgacccccgttagccgcaaataagttgcacaactatgcgtccttgctctgccgccattttgcgaggcaggcaca

SEQ ID NO: 42659 - DNA, 820 bp, DROSOPHILA
atgcacagcactccaaggtccaaccaccactcgcgacacggaacttcccactacaacggagatcagatttcgcagcagttgggatctggagcagcacaacatccgccggtgcccacgactcaacctcaacctccgcctccgccgcccctgaatggaggtagtggtgcatccaatggagtactctatccgaatgcaccctacaccgatcacggatttcttcaaatgaccctcggatatctctcgccgtcgtcgggcacctacaagtccgtggatccctattttctatcacaagccagcctgttcgggggagcgcccttcttcggagcgcctggctgtgtgccggaactggccctcggactgggaatgggcgtgaatgccctgcgccactgccgccggaggaaggctcgcacggtgttcagtgatccgcagctgtccggtctggaaaagcggttcgagggacagcgatacctgtccacgccggagcgtgtggagctggccaccgccttgggactcagcgagacgcaggtgaagacctggttccagaaccgccgcatgaagcacaaaaagcagctgcgccggcgcgacaatgccaatagcccgtcgacttctcacgcagcgaaccgggcaagcagccgggcgaggccacctcctcatccggggactccaagcacggcaaactgaatcccggatctgtcggcggcacacccactcagccgacgagcgagcagcagctgcagatgtgcctgatgcagcagggttactccacggatgactactccgatctggaggcggacagtggcgacgaggacaactccagcga

SEQ ID NO: 42660 - protein, 226 aa, DROSOPHILA
MHSTPRSNHHSRHGTSHYNGDQISQQLGSGAAQHPPVPTTQPQPPPPPPLNGGSGASNGVLYPNAPYTDHGFLQMTLGYLSPSSGTYKSVDPYFLSQASLFGGAPFFGAPGCVPELALGLGMGVNALRHCRRRKARTVFSDPQLSGLEKRFEGQRYLSTPERVELATALGLSETQVKTWFQNRRMKHKKQLRRRDNANSPSTSHAANRASSRARPPPHPGTPSTAN

SEQ ID NO: 42661 - DNA, 4054 bp, DROSOPHILA
gagttgggttgcttctcaaactcatcaacctcaacgtattcagcttaagtggaaaaataacatataagtatttatcgaggaccaacgtacgttgtctacatacatcgctctccctttttcaggtcctgcggcatattataacgctggatgcgctctagttcccgcgccttctcgtgctccttggcgatgttcagcagttgcttcttgtactcgcgctcctccttctcccgtttggtcaggctgaaagcaaaccaggattatttggatacctatgtaggtaaggattaagctatgatcctacacgctctcatcgaagaggtactcatcgtccaggatgtccgcctccagctcggccaccttgtcatccttgcgcttctccaggtactggcgacgcgactgcagacgcaggtgaggcactatcttgtcccgatcctcatgctcaagcttcagtcgcttggtggcctcctcgatggcccttcgtccgccggtggaatcaaccacattgcgcgtccgatcgtcatcccgcttcttcagccggctggcgaactcgtcgcgctcctgcaggtcctttaggcgagactcttcctcgctgtccggctcctcaccgctgctgctgctgctggccgtgcgttttctgtttttacccgacattttcaagattgcctataaacaaaccggctagcgataggtaattcgataacatgcagtgctgccaagctagctattttcagcactgggtgagcaaacaataataatcaaattgctaaaaatatattatatatatatataatattctatatttattttattacaaattatgtttcttatattataggcttatttgtggcaataactagttttaaaggacttatgggtacaccttcatggcacattcaattttgtgtgttgctcatttttttttgctcgaatttattagtagagagcatcactgttcccctaacagctgtttaattcgttaaactcacctcagtttcatatcatgtcgcgccaattgagtttcaatccgcagaaagaatatgagttgatcgagtaccccggccgagtggtaaatcccgatcggatgatagccactctgggcggcatcatcaatgtgtctaaggtatggaattcaacctggtcaggcaatcgggcaacttggctgatatcttattccatgcacaggttttgggcgacgaagtgaaacgattggcgttgcacttccatccggagaatccctacaacaaacccacttttggggactgcacggataagactggtgtcctgctatccataaccgtgaggcgccacaaaaaggacaagcaacggcctccggaatattttgtgcgggtgttgggccactgcagcaggagcttcacctttgaaagtgagtagatggtcggaattccatccacgatatattctaatttccttttactttaagcgctttgtgatttccaatacctacccctctggtcaactcccaaaagtgacaacgcaaatgctgcccaggagctcacgtacgctttggaccagttgaaacccaaaaacaccaccgacttggactactttaagtgagtaacttgtccatattcgtgctctgtgcaccaagagaatgagatcctggtttgaaagctatatagcatgtataattaatcattttaatgctcagtatgtaaaagcatcgtatttttcccacagacgtcgccacagccagttgctggcgctgcccgaattgttcacccacgtggacactgtctatgcgggcacgtatcgcatcgatccctcagaagacggccaacatgaggtgctgggcgtgcagtccaagtcctcctacgacaaccagggcgtggtctcgttcaacatggtggacagctttcccacccaggcagactcccaaaaccttaaacgactcaaggtcaagtacgtttcggatgagcagctggcattggtcaaaaaacttttcgatgactgcccaatttggacccgaatcgcgctgcaatatgaatcgggtttgaccaacgacaaactcaagtgcatcactccatcgctggcattttactttagcaacggcccgtggcgcactttgtatgttcgcttcggctacgatccccgcaaggacttcaatagtcgctactatcagactttcgacttccgactccgattcagcactggtctctccgaattcgtgtatgctaagaagttcgtaaagcaacggagggcggcgaacgctccattcgcgcccatcgaggatcgagtctctgatttggttcaggacattgactatccctacttcgatgagcacaagctgccgcgctccaggcaatgcatgctgcgctactgcgacgtccgtatgacgaggatccaggaaatgttggagaagatccccactccacttaccggagctgtgtgcaatgaacgcacgggctggctgccgccgggattcgatgctcaagtgcgtcagattgtctgcgcctcgatcagcgaacttttgcgcaaccattaccgcaaggagaatcttacagccgaagtggaggcagttacccaggccgacgaagaggatgaagacgaggccgaggacgaggagacgcaagaagaggacatggagctggatgagacgcaagctatgggcaattcggagcaattcgtagacaacgacatcgagcaacttttcgacaatatcacaagctgaatggaaacgctgactgaaatgattatagcataggatgtaaattgtatatatcgggagcgatgatttcaccaactaggtcatctagacaccaccaagacactgctcatccttgggagacagctgtcaacatttcccctcttggcacaactcttagtgccgtctacatagtctttcttgtgatccatcataactttcaaagtctattaagttcgtatcgatcatctcaaaaggatccagttttgttaggtgacattcttcagcttttaataatacatgttcacctacgttgaatccaattactttcaccttattttagcttatatcatatcaagcattgtttttcataaataagccctaaatgcatcaaaaagttcacaagtgcttatttggctacatttctatactctgtaactaactattttttttatatctgctcagggagtttatgtgttcgtcccatcaaatttatgatttgtgtgattgcccgaccaaggagaagaggtttttatgaaagtcgctttactgcattgttttcacggctgactcctccggtaatctcgttgctcctacggcgttaatcctgcgacgctttgccttcgttgtcctatgtttccttgacaacacgagcgggatcaggatgctatggggcatggtgtatagtccacgggctaaggaaacgctcgtcctgggaccacctctaccgaccactgactccactgtccctttcaaacacgccagatccttgttcctccactccaaggatcgctttccacttgtactgctcgtccttccgtgttctgtgtgtttctcactgcctcgcacgttctgactcgctgattccttccccaacagagtttcattttttctttaatacccttttaaagtatcgcaaatttgtttagtttatttcattgaatgaagcggaggcgcggcctttattctttgataattatgcagatgcagataatgcagataaatgtgttaaatttcatttttaatagcagaagataaatttataggtagcaagaagttctacgacccctgtaaatgccggctgacggattgctctctcctgcactgcctagggcctgcatctgtcgaggaatcgagggtacaggcagacctcgcggatgtggtagcggttgagcagccagcagaggaagcgctccagtcccaaaccatagccgccatgtggcatggttccatagacgcgctggtccgtgtaccagtagtagggctgtggatcaatgccttcgcgcttatagcccttgagcagctcctcgctgtcgtagatcctcatcgacccgcccacaatttcgcccacatttggcagcagaacgtccacgctctcggtcaaacgctggt

SEQ ID NO: 42662 - DNA, 1808 bp, DROSOPHILA
atgtcgcgccaattgagtttcaatccgcagaaagaatatgagttgatcgagtaccccggccgagtggtaaatcccgatcggatgatagccactctgggcggcatcatcaatgtgtctaaggttttgggcgacgaagtgaaacgattggcgttgcacttccatccggagaatccctacaacaaacccacttttggggactgcacggataagactggtgtcctgctatccataaccgtgaggcgccacaaaaaggacaagcaacggcctccggaatattttgtgcgggtgttgggccactgcagcaggagcttcacctttgaaacgctttgtgatttccaatacctacccctctggtcaactcccaaaagtgacaacgcaaatgctgcccaggagctcacgtacgctttggaccagttgaaacccaaaaacaccaccgacttggactactttaaacgtcgccacagccagttgctggcgctgcccgaattgttcacccacgtggacactgtctatgcgggcacgtatcgcatcgatccctcagaagacggccaacatgaggtgctgggcgtgcagtccaagtcctcctacgacaaccagggcgtggtctcgttcaacatggtggacagctttcccacccaggcagactcccaaaaccttaaacgactcaaggtcaagtacgtttcggatgagcagctggcattggtcaaaaaacttttcgatgactgcccaatttggacccgaatcgcgctgcaatatgaatcgggtttgaccaacgacaaactcaagtgcatcactccatcgctggcattttactttagcaacggcccgtggcgcactttgtatgttcgcttcggctacgatccccgcaaggacttcaatagtcgctactatcagactttcgacttccgactccgattcagcactggtctctccgaattcgtgtatgctaagaagttcgtaaagcaacggagggcggcgaacgctccattcgcgcccatcgaggatcgagtctctgatttggttcaggacattgactatccctacttcgatgagcacaagctgccgcgctccaggcaatgcatgctgcgctactgcgacgtccgtatgacgaggatccaggaaatgttggagaagatccccactccacttaccggagctgtgtgcaatgaacgcacgggctggctgccgccgggattcgatgctcaagtgcgtcagattgtctgcgcctcgatcagcgaacttttgcgcaaccattaccgcaaggagaatcttacagccgaagtggaggcagttacccaggccgacgaagaggatgaagacgaggccgaggacgaggagacgcaagaagaggacatggagctggatgagacgcaagctatgggcaattcggagcaattcgtagacaacgacatcgagcaacttttcgacaatatcacaagctgaatggaaacgctgactgaaatgattatagcataggatgtaaattgtatatatcgggagcgatgatttcaccaactaggtcatctagacaccaccaagacactgctcatccttgggagacagctgtcaacatttcccctcttggcacaactcttagtgccgtctacatagtctttcttgtgatccatcataactttcaaagtctattaagttcgtatcgatcatctcaaaaggatccagttttgttaggtgacattcttcagcttttaataatacatgttcacctacgttgaatccaattactttcaccttattttagcttatatcatatcaagcattgtttttcataaataagccctaaatgcatc

SEQ ID NO: 42663 - protein, 480 aa, DROSOPHILA
MSRQLSFNPQKEYELIEYPGRVVNPDRMIATLGGIINVSKVLGDEVKRLALHFHPENPYNKPTFGDCTDKTGVLLSITVRRHKKDKQRPPEYFVRVLGHCSRSFTFETLCDFQYLPLWSTPKSDNANAAQELTYALDQLKPKNTTDLDYFKRRHSQLLALPELFTHVDTVYAGTYRIDPSEDGQHEVLGVQSKSSYDNQGVVSFNMVDSFPTQADSQNLKRLKVKYVSDEQLALVKKLFDDCPIWTRIALQYESGLTNDKLKCITPSLAFYFSNGPWRTLYVRFGYDPRKDFNSRYYQTFDFRLRFSTGLSEFVYAKKFVKQRRAANAPFAPIEDRVSDLVQDIDYPYFDEHKLPRSRQCMLRYCDVRMTRIQEMLEKIPTPLTGAVCNERTGWLPPGFDAQVRQIVCASISELLRNHYRKENLTAEVEAVTQADEEDEDEAEDEETQEEDMELDETQAMGNSEQFVDNDIEQLFDNITS

SEQ ID NO: 42664 - DNA, 16975 bp, DROSOPHILA
taaaaagttaaatattccttaaaatcttaaaacctcactatatataaaatatattttatggttattgtagtagcactatggaaattaatataaagaaaatctcaaattggtcgtagtttacttcaagacttcagaatgctattattttttaacaagtttgtcttttgcaataagtttaagccataagctaaataattatgaccagaagtgtttgttacatataaatgcgcttgtttactgtcatatttattttgaaagcccgttgtagttgtcgctgaactataacaagtgttcgaactataaattgatgtaatacaatgcaaatgagtataaatgtaattagcaataattcgtgaaaaaacgcgacacgaaaataattaaaaaatcaataacgagaggaatgtgctgaaatgtgtgcacaaaaatggcaataaccaccgagcaacaaagtttttttcttattgcgaaaatgtttgtacatcttgctaattgtccaaaatggcattaaattaaaagatggaaatggaaaaaaaaactacttctttaaggcataataaatgaaatgatttaaaccaaatacttacttaagatgttgtcatcacgaatataacccgaaaccatattaaaagcacttcagatatttcatgattataaagaattttattaaacgatttaaaattatttagattatgtgtttcatatagacgaagtgtttagtgtgaagtctgttagacaatgaaaaacgtatcacagtttacaatcttattgcgctaattaagtttagtatttttaagtttttttttagcctaagcttacattgcagttgtcagaggagaaacatttgatctggtactctatatactcttagatacatatatgcataacttgaatgaaacttgaagttacttaacgcgctaaacggctacatttaatattacacaaatccgtccgattcttgcacgatcccataatgtggctatatatatggtactatatccgattagttggtgaacttcttgaagagcggcttgaacatggcctcattcctttgcagctgcggcgatgaggagctgctgctgctgctgttcccgctgctgtaatcatcacgcggcgaatactcccccaatctggccgagaaattcatcgggtaaccgctggcggggaagccaaaggcgttactactgcgacaggtagcggtcatagggacttgagtagcggtaggcaggagactcaaagctccgctcagcaccttcatattcggcggagtttggggtggagtatctggttgggcttcgagaaaccccatcgcccgctgactcgctgtggattgagattgctgctgcagttgctgctgctgctgcggatgccgattgtggaactgcagcggtattattggtccgctcgaacttcccgtagtatggatggtaccgccctgctgcaactgctgctgctgctgctgcggctgctgctgctgcgggggcatattgctgtaggggatactgttgttcgtagtatgcagttgctgggtcgtagcccctagaaaacccccgtaggccgtggtgtgcggcctcaggtatggagctgcggccccattgaacagctgttgatctcgtcctgcctccgatggaggatactggtgctgcgcctgctgctgctgctgttgctgctgctgctgctgctgcagaggcatcgattggtgacccatgtaagccggcggcggtgtcttgcagccaactgtgtcggccagactccagatcttcggcttggtagctggaatcggcacgccacagtcccggcctagctggttttttggatccccaagatccgtctgcagtttggagttctccccatgaaatggcaacataccgccctgctggccagcctgatagtaagcgggatgctgatgatgatacggatggtagccaccggggtggccactggaggagccacctccgccggggtaaccaccactaccacttccggctgagggataaccaaagccggcgcgcagtatgttcgcctgaccgaggcacttttggtcctcatctatggcatcctcctcctctttggtctcatctggttgaaagaaacagcagctgtaagtatgttagccttggaaacccccttacatcctatacctttggccaaactgacactgccctggctgcccttactcggctccagatcctccttgtccttctcatcgtccgacaccaaggcgtcatcatcgtcatctgtgcgattcttgggctcccacgtcatcttgttctccttcttcagtcgccgacgcgcattggcgaaccaagtggacacctgggtgagggtcatcttggtgatgatggccagcatgatcttctcaccctttgtgggatacggattcttcttgtgctcatttagccaggccttcaatgtggccgtggattcccgcgtggcatttttgcgacgagcagccaggtcgtaactggctccatagctggaattagaaacaagcaatcctctgtttagagaacagatgccatattatcgtattcataaattcaatggtgttttattttgtatattaataagaaatatgtataataatgcgcgttactaagttttaaaggagtaaatgctatattttcaaaatattcaactaaacatatcttaacaaatagtatatttattgctaaagcttgaaaattaagtaaaatttaagtctcttaaatgtatctatgtatcttctacccagaaaactcaatatttaaaaggttgttttgttctctttgataaaattgcagtagtattatcgttctaattgcgagaacccaaaaaatcgtggcagcagcgaaacatggaaattcattaaaaatgcggaaaactcaaattgatgttttcctacaacctatcactgttaaccaccccaggagctgcgcgttctcgtcctgccagtgtagtacaacgtcaaaatattgtaaaacatagttgtgaaacagggcatggccacaaaaagcaacaacattcgaccgggaacagcgtctccggcaataacgaggaggacaagtgggtgcaaccgggtgatccagttgtatccaccactccaccagttgccgccggttcacttcgccagtgcacttatcgcacattttttcaacccaccagaggctgtgcgggcatctccatcatccgccattcgtcctctgcaataatggtccttttggcttggtgggttggcttgctcctgcacccccgaacccccttccagaagttcctagctaaattaagcccccaaaccaggcgaactccgctgcacatccggctcatccgcttttcactttcgggttttcccccaaatcctcccaatcccccaatcctcctccattattttgcgtttggtcctttttcatgggatttttatggagccacaatcaacagtttgtgtgcggtgaattttacaacaagataaagaacgaatctcggcctcgctgcccgtcgaatgtaaattcgacgtccttcctcctaggtccttctgcttttttccccaacttttttttaatcttttttttttgtatctcgattgcgtgcagtgtgcaggatgttcgtagtgattagcacaagagtttggaggaggactcgtgaatttccattcgggcaactaagtacggtgtatgttctccatacaatctgcgtgtttttgggttcagaaaggactacttcaataagcagattggtagaaaaagatagaaaaacgttttatgaaaaatgtcatatatgtgtcataggaattctatattcaagaaaaactattttgaaaggaaactaagtagaaggtatctaatttaatatgaggaatcagaaaagacttgaaattctagtattgtggagcagcacaaaagaagtaaaggaatatgtgttgattagagtctattaaattatatggagagtaactatttaaagataaactatacaaagataaactattcagaataatagttccctacctaataacaacctagttagttatattgcgtccgctaaagtgatccttcactgtacccctcgtgtagcaagatttgtccaataaccgtgaccagaggttgtgaagcccataattttcggcacgtaacccggctacatcggccaaaaggcggagctacatatatgtatatatacatacatatatagccgggctatatgattatcgcgtagttcggtagacggattcgtcggattcgacggatctgatgcgagtgatacgctttgtgggctttttgtgctgttatgttttacaacctaacaaacatcaatttgtccgtaattggcacgcatcctatttttgtattcgccatataattgcagtgcccgccgatgtgcatgtgtacatgtgtgtctgcgttcttttggcataactcgtaaataaaataaaaaatgcaaccacaacaacaacaacaacgagagtaaaaaaattaaaatgatttggctgctgttgctggcgggccataatcttgttaacaaatcacattcttgttcacacaaacacacggacacggctatatggccacatatagagccacatatagcggtcggccgaatgggccgcttattagttttagaccggcttacacccatttacatttcagcttttgtacgaccagccacatgcaatttggttgggagccaacaattacggcggccattatctctgagttgcgattttcactggctcgcatttcgcattttcgaacaaataacgctggctgccgacacaaatgacattggctcccgtgagcagacacgtttcatgcctgtcacggggtaattacgttgcctgtcattccaccaaaaaccacccacccactcgccacctcctctgctcaagctatttacagccagcacctcctgcccctgtcggttttgccccaccactgctggcccatgcaattgccatctgccagacagatagaccggctgactgtcagtcagtcagtcagtcagtcagtcaggcattcagtcagtcagattttccacctttccatcgagtttcccgctccgcagtttcccattccattgccaatttgtgacaatgagcaaaacaaagcgcaaacgttgctctcttaaatgtttgtcaacccgtgaatgtgtacacgcctacgcacagaaaaaaaatgttttcttaattaattaacaaaatacagcaataatgctatatacttataactaaattagttcgaaagatagtacttcaagattagaagtgaagaggtagtttttttgtacatttcttaacatttttcaagtcaattgttggctttacaaaaaaaaattaatatatcctccacaacaatattaaattaaatccatattaagtaacactgctcaacataacttttaaattcagaccaaatggatttccaagctcgaactgtacttaacagctttgcaattgcttgacattttaaggagatgatttgttgatacaacatcaatttttcttgcaataattcttatcacactcaaccttagcttaagctttttcgcttagtgtactgcacatacaggtcttagtacatacaaacaccggtagattggcaagtaagtgcgtatgtactgccgctcaatatggcggccaacatggcgttcatttgcggctcacacctacccgtccctcggcccctcctccaaccgaccgaccgccctgccacctgccccttccttccactgccatcccacctcaccggtgcaccccctccaatcaacatgcatcgcttacaactcactcactcattcattcacttagctgcagctcgatttcatgggctttccgcacgcaagccgggcccaaacgaaagcgaacccccccaccaaaatccccgcaccgcaccgatccaataccatccgaccgtccagagtcgtccaaaccaaaccaaaaccgtccaaaccgacggtccaacgggaagccgcagccgttgcatgccactcagtctttcaggctttcagccttttcagtcggctcttcccccgatttgggtacggaatgagcggggactgggtggactcatgcctcctgtccatcgaatcactcctgtactctgcatatgtatgtatgtacacacatgtatatgtgcgtacgcacttgtgtgtgcacccacgtgtgtacatacttagggcttaatgtatgtgcatacacaacaacaaatgctccatgttttttatatgctcaaaatatttatttaataggtgctaattatacggcacattccagaaaatcacgcacttacacggcgcagtaaagtggagtgaattctgctcaattcattaacttctttttaaagttttctaactttttaaaaaaactatccaaaattgcatacaaactaaatgcttgaattcatttcttataatattaatgtaaaacctttataaaaagtgttcttttttaattttccaaatcttgaagatttttaaaaaattttaaaaagttatgaactttctttcagtgcaaatcacacatatgtacacatacttttgaagcccactgtgtgttgtgcgttgtgcgcactggcgtgcaattaactgctattatttttgcagcaatcataaataaataatttcgcgctctcatacagtttcgaacaattcaaattttattatcgcccgtccctgcgacaattgcgccatttcattggatgggaggggggggggggggggggtaaagcgaggggggaaaatcgtagaaaacgcaggaaaagtgagcagcacaagggcaacgcagccgccgcaggcaattaaattcaaatcaatttcaagtactcgcaaatattttgtaattaattatgggcgccccaaattgcatttgatttcgcacgaccccatctatttaaattggtctaaaaggctttctatctatttgctattagacgcaattaattatggctcagacgaattttgtggcacagcgccacacaattgctgccacgtttttaatttcgtaaactaattaaattaaattgaattaaatgaaattaaatgtaatttagtaatgcttacccgtaggccgacatgggatcgtaggagtagtagcccgtagtgggctgaagtccagccgaggtccaagctcccatttccggacccgcgcccgtatccttaagtccgtacggattgctctgcaaaacgatggtggaattggttgattcagttggagcatggaattgagttattagcgaacacggcattttcccacagttttcgaagttgacaattttgttaacatgaaatctataatttggcaacatattttggccggtcgaacaagcaaatgcccagatgttggccatattttagagccaaagatacacggaacgatacagaaaaatacataatttaaggcagacaaaattcgggtattatctaagtcgtagcgccgattattgttattagatttgaaagcgcttaagtccgtacaaaagcccggacactttgaattttaatttggctcgatttctgtttgtggcacgctgcgatttatgccctcggaaaatgacagccggatttatgagcgacaactattggccagatcgccgtccaatctggttggccctgtcgagccgggcttttgtgtgagctcttgatttatgaaacggtattaacatttttaattgcttaacatcatgtatgccgttgtttattaatttttcaccccacccctttctttctgtctttatggccagaaaaccgccgccgccgccgccgccaccgagtgacaaatatatttatcaaaatgtcgtaaaaacatatacatatatatatatatatacgaacaggtattggatttatttgcccaatcgaatcgaatggaatcgtggggaaatgtcagaagtgagattttgctagatctctacccacccaaaaaataaaaaaaaaaggaaatgaactcggttattaacacctccgaaattcgaaattccggcgacatcttatcgtggcaactccgagatattttcttaattaaaagaatgcttctctgacgaccgataaaaaagacactcgctcaggtgcttgccagaaaaacaaaaataaagaaaaaacaaaccaaaatacaaaaaaaaaaaaaaacgagagaagaaaaataaagaacgaatgaatttcctgttgttgtaaataacaatttaacatgacactttggtggctgccgctgccgttcccgccccatttcctccgcttttcctctctccttttgccggggttttcccttttctcgaaggaggttttctttgaagtactcgtcgcgagccgcccaagttgattagaccccgtgttcgtccatattaattagatcgttcaaactaatgtgcttattacagcactcgtaaacatcggggaaatactgttgacaaagtcgagacaagtgtctgaggatttctcgaaattgggagcaatttatgaaacgtgattgtttaaactgggggtagagttattgtggctaagagcgtacctaggtatttatgaaatttttatttacaaaaaggtggctaatgaacttatcaactggaaatgagtatttcaaatgacaagaaaagtacaacttctgacaaaactttatgcaaatgttcgatatgctctataatgcttttgaaattgaagtcacatctagctaagtttacaaattaagaggttcgattaaaaattgccaacacattttcgacaaatagtcaagataccaaaatcgtgcacacagaccacgtcgttgaaaatatttatctggtgtgcgatggcggcaacatgatgtccttataaaacacttgctcggttatttggacacttctagctaagcctatccatctcgggcagttagttatttgccaaggttaaatactgtccacattgttgttatacatattgttgccaattttgtgtgtttgtttgtttgcgttggcctttcattcaggccagcagcagcccgaaaagcaaagcaaaagcaaagcagcagcaagcacagtcatgctgtgctcgctcgtgtacatttcagcggtcacttagagagtatacgagcacagttgggggcaaaataatagggttaaaaaattatttaaaaaaattattaagaaatcattacatatcagcaaaacaaaacaagttcttaaaatgaaagataacagataatacttttcttaatttcttcatttatgtcgtaacagtttaactattttaaaagctttcaaatattattttttattattattaaataaaattaccttttaagcaaatctttgtttttttatgatgggccattaaacgttataaaaattaatgctttcatttaactttcaagcccatacatttatctttaagctggttatatgccgactagaagtattatcttattttataaattactaagctgttgaaatttttaaattgttgttcaggatatcctgaaactgctttgctattataataaatagcttttgcaggcaaagtactgctattactatttctaccccccactgtgtgggcgctcacacacactcacacacacacagcgacataagctcgattagcccacacatacacatacacgaagagagtggagtgtaattgaggccatggggcaatatgttttgttaccaatgattttgcctttctttatgcaaagtatcgaatatcgcaatggaagtcggcagttgtcagtttgcagggaaccggcggagtaaacgggcttataaattaggtagatggatagacggcgatagaaaaggattggccattggttaggaggggggggggaatggagctcggaatggctatgggtatgggtttgggtatggaattgagccgcagggaaactaaacccccgatacggagccaaatgaggtttgactgagcttcagtcagccataatgataattcgatttagtcgactgcattgacaagccatcgatgttgctgctttgtagctttgttgttgtcgttggcgttgtcgttgtcgttgtttttgtttttgtctccctcctaagctgcggacaaaagccactgactacacaattaaagtcatacgttgagataatccatttagccctctggcccatggctcttggccaacacacttggcaaaataaatacacccattttatgttaaattaacattaaatgaatgactaaaatatcattacacgaactcactttatgccaaaggtcaataataaatttaccacaataattattaaaaaaaaaaaaaaaattataaaacaatgcataattataccttgatttttcaatatttttcctaacattttttttacattttttcaagttttgaataataattttgtctgtataaaatcctaaaccttttgttttcttccccccttttgttgttcaagtgcactcaccagcggcgaatagaaggcggagctgtccactccgatgctctggtagggattctggtccgttgaggggtacggcgttccatagacgccaacgctggccgccggtagacgggagtagctggagagggcgaggcgggcggaatcgtactggcaggagcagaccgtctgacccgacaccgggtcggtcattatgggccgcccgttctcacagcatgatccaccaccaccagcaccaccagcagtgggcgtcgtgcccacgccgttgccgtccagggagccaccggtggccagatccgctggccctcctccgcccgccgaggatccaccacctgctccaaccaccgtcgccgcattcgagttctgcgaaagcgcattgggactcagcgcccccgaggaggcatctccgccagcgccgcccgacggctggctaccctgacaatcctgacctcccgtggggctcatcgccggggcgtttgtcatcaccagcgcctcgttcacattcacattcacgttcgcggaagcgtcctccgtcgtctggacactcggtggcaggagctgcaagagatcggatgggaagaggctcttcagtgcaagttcatcgcaaattgaaacacaaattcggggttttagccgcttatcttatgggtatattaagttgaatgcacagggaaaaaataaaggtaattcctttgatgatttaaataatttataatttaaacaagtttctatttgagtttttattccagcagataattgactttcattgatttatatagggttataaaataattcagatgtgaaatacttaattgataataatttaaccagctgctaaactaatgatgtctaaaatcgagttgacattatcgaaatcgcattatattttacccctgtgcacaggtacttcaaaactcgaaaggcagtcgactgatgatagccttaagtgatatataaacacacatcgccactggtttacataactaatgcatgttaatcaaggggccattttaatttttatttcaaacaccaaaggtccgatgatcgagaaatattttccctcgccggcaaaagggtcattttgaacaccttatagagatacgaaccgctgataaaaccccacaactcacacacactcgcagaggtggggcttccgagaaacccccccaatcattgaagaaaatatttcatttcgaacacaaaacgcagaccctaaagctgacagtgtttatctcaaaacatttcgccaatgaattagtttattgcgctgctcaaatgataagatagttttcattgatggatctaaagaatgttccaagcaaatgattttggtaacttatttcgtgcttttatattacgagatttaaacacttgaatactactgttttttttttcaatttttaaatatatataaagctccgattattgaaaagtaaaaaaaaaaaccaaagaaaagtgaagactttataaacagattctcttaagtaccaacactttgtccgtattacttagaaaattgagaagtaatttaataattatctaaactatccttgaacagcgccataaactagatgtcaactagctgcgaggatggaaacctgcccgggaatgggatgactcgcctccaatcgacgcggcacaggaaacgcacgtccatgtataatggctaattttctgcatcataatgccgagtaagtcatgctaactgccgtactggaaacttcataaatattgatgtccggcaatgttgtttacccatcccccagatcaatgtaccattttgcaggccatcctcctactgaagacacaaaatccgcctgaatcgctgggtaattgcgaatttaattcgaaaaatcgacagtaggcacccattacaagatgcatcgataacatgtaagcgaatatggtgttaacacacaatcaatgccactggcaggaaagcgcagaagctggacgggattcataatcccgcggcgattaagttcccttaatcaatggagtggattggatcggatgggagtgcagttcgggattcgcgaacttcgctgcaatggcggccagatcaattacccagcaaatcgattccaagtgcgacggatcggcaacgggggcagcctgatgtgatgtcctccatcttttacacagtggaacctcgcctatggcatgcgccactcacttggcaattaatatgcaaaatgtgccaagcccacgaagccagttctcttgggggcattttaaaaaatgccagaaatcaatgagggtgtggcagccgacgcctataggtcccagcaccagaccagaccgactttttcggacccatccacaagatcgatgtggatatgggatgcatggaattgatgcagatggagatggagtcgggcaacatgctggcgaaggcttctgaaaattaccgcgggcaatctgcaaaacgagcggactgcttcaatttccccacagtctgcaatctgcaaactgaagtctggaagtttgaagtctggaagtcttgaagtttgaagtctggaagtcttaaggtctggaatctgaagactttagtcttctgggcgaaaatatcgacgcaccgaacccataattaagttgagtgctccgcccgttggacagctacaaattgatcgaagtgcccagcaaaaggtcataatatctgggcagcaacaattttagcccggctaacacggcttctgtggccgaattcgcggtcaaaacttaaatgcagccagcagaatgcataattattccgcgtcattaacataatctgacaatagaaccatcttcttcgcccgaaaatcgcagcacatgcatattattttataattatcagatgcgatcgattcgattcgagattgatcccctcgaaattcagcaggtgagtgatctactagaaggtcgctcaagtccgatcataattaataaaggaaaaacatatttttttttgagtcgtgctgaaacgcacaaataatagaatttcgaggccaagaccgctgactatatatagggacatcgaaaaaaaaaatgtgaaaactcacagccatttatcaaaattttacaaatgaatgattcagttgttttacttttttgacttttttttttgtattccaccgtgccgcgtgattttaattagtaaaaagcaaatacatttcgctcgattctgtatgggaatgttcagcgatcgaaaggaggcaacgcgttcccagagtttctcggcaaacgcaacaatatgagaattatgacaactaatctgataggcgacaccatatagggagctctatgcgcctgccagattcctcagctccttgagcgaatgcattattcatgaggtagaggactccattccagcagtacctttccgctctcggaggaagcgccagtggtccagtgggccatgtgaattggccacgtctgcggatggaacgtggaactttcgttgttcgcagttggaggatgcagacgacgacgacgactggcaggcgacagtgcgcagataagatctgctggccatgtgtgtgcccagtgagcagtaaccagtaaccagtaaccagtacccaatgcccaatgccagatacccaacttctgagttgcactggctttggaaatttctgtgaatcgcaaacgcagcgatctaatcgcagcttgtatctcgtgggtccaccaaagcggccaggctaccgcgattctgcatccgagtgcctcccccgacaatctcctccagatgaccaagttgatagcaccggactataagcgccacttggagccgcactccgctcattctcctcactccccaaaacgaagccaatgtaaagtagatcagagtggagccaagtcattggtccatcgatcgtgttcgttgggattcggatgctatcctatctgccatctccagattcaatggatgctcctcacgtagccaggagggcattcccagagcctgccctcagctgtcactttacggttatgaattttatgatttacgatcgccgcaattgaattttattgacttttcaacagtttcacctgagcgtgcctcaatcggcacctcccatcgtcttggccttctgattgccaaggcttttcccttttttcttttcctttttctttagttttttttttttttttttgctttcgttttcgactttagttaattgggctcgtgtggtccgaaatgggaaagacgccagagttctttggaggaagaaccaggcaattggtaaccaagtattatggcctgggaaattaaagtttagcccaggcaaacgcaatcaataggaaatttaatttactctaggcctttcgaaagcttctacaacttttgtaatttatcacaatattttacaaatattttagttgcacctgcaagccgcgcaattttgtgcaacatctttaaaacgccgaatcgttttttgtgtgaattttgaaggttgacaaaaacgcctgattcctcggagtggctttttctcaggccatttatcagccatctgatttattatggttttttgctggcctgccaccaatttactgtcataaacatggaaaaagtttgcctcaagcagctgtttttgctgcttagtgaaaagtccaaaagcgctacaatcaaagacttttagcggttttgccctatagtgggtcctcaagatcaaataatcggataactttgactggagtcggtggaagtactcagatgaaagttggtggtaaggattgcttaaaaaacacacaaatagaatttaaacccaaccaagcttttttaggaaaaaaattttagaaaaaatattcagataacgggttcagttttaatgatggaacgcactccagaaaagatagttgtgattataaatagaaaaattaaatatgtatatgaaaaaatatgattttacaacgctttttgcttgtgacctctgtttttaatacctccaaacataaaaattatgaatctttaaggcaatcataattacaataatcagttgattatatcagtcgtatgaataatattgtatctaaataggttcccatatctgcagttaataaacattttcattcctctagttatcttgagatctcttgctacttaatgaatatgaatagccatcatatagtatatacatctagatcaaatttagttaattagaggacccacctgcgaggccgacggaaagcctccgtatccgaattgtgtgtaggcagccatttcgctatatgactatacgactatataagacctagtcttaagatactctctctctctctctctctctctctctcgctcgtgggcagtctgctgaaggatatacggtgaagctgctacatcaaatgatgtgcttatcgggggtttaacagctcagtttcgattgggtctgttcacagtgggcactggcgataacgaccataacgacattgggccaaccgaaagtatctcgtggatttgtttggtatttgcagttgcagctgtcacttgtggtggatttttgtttatatatattttatttttttttctggctaacagcactcgcaaaacgcggcggcaacgaaaaatcgacgaaatatcgacggcaaaaacgcggcgcttcagcacacgctccctttcagatgtgcaccttataacgttcgaacacgaactggttgcgaatgccgttgctgttggccgtgttgctgctgctgttgctgttgttgttgctgcgctgttggggcgcattccgctgcagttggcgcggaagcgggacaacaatatgctgcctccccccatcgaaagagaaacggaatgccgctcgccttggagcgagcaacaagaataacggagtcggcagactggaagtgtaagcactctagagcaacgcccaccgttctccggttttgtctggtgttggtggtggcatttggccggtcgctctctccgcaattccaatccgattccccgccagtgactcgtattcgcggctcactggaagtgaggccagcgcaaccaccaatcgtagggctgcatgagcttcggctggctgatttaatggacaggtgcgaggtcgccaggcgaaagaaagcaaagaaaagaaaatacaaatgaaatgagcggatggtgaagggagaggaagtgggtagggagcgggacgcattttcacaactgtcgatggtctcttgttttacccacaattcccgggcaacgcccatttgttttgtttggctagtcatttgtttgtttacttttcacaattgcgcgcccatcgactggaagtgcgccaccagcgatcgccagctggaagtggcaacaaagtgctgcgatggccaaaagtggcgacacaaaagcgttaataagatcagcaaattccaagacactcgcactgtatttatcgtctgtcattatctttatcgctgcattgcactttagttaactcccattatcgatcctcactaattaatctctcctaattcgggtttaaatgaaacatttccagcgatctttgtttaaatatcattccacttggataccagttacttaaattatcaacaagattttaactttttatggaaggaattaatatccttactcaaacaggcaatcataccattaattcttgggatttttaaatatcaaccagatttttacttagctt

SEQ ID NO: 42665 - DNA, 2571 bp, DROSOPHILA
aacgttataaggtgcacatctgaaagggagcgtgtgctgaagcgccgcgtttttgccgtcgatatttcgtcgatttttcgttgccgccgcgttttgcgagtgctgttagccagaaaaaaaaataaaatatatataaacaaaaatccaccacaagtgacagctgcaactgcaaataccaaacaaatccacgagatactttcggttggcccaatgtcgttatggtcgttatcgccagtgcccactgtgaacagacccaatcgaaactgagctgttaaacccccgataagcacatcatttgatgtagcagcttcaccgtatatccttcagcagactgcccacgagcgagagagagagagagagagagagagagagtatcttaagactaggtcttatatagtcgtatagtcatatagcgaaatggctgcctacacacaattcggatacggaggctttccgtcggcctcgcagctcctgccaccgagtgtccagacgacggaggacgcttccgcgaacgtgaatgtgaatgtgaacgaggcgctggtgatgacaaacgccccggcgatgagccccacgggaggtcaggattgtcagggtagccagccgtcgggcggcgctggcggagatgcctcctcgggggcgctgagtcccaatgcgctttcgcagaactcgaatgcggcgacggtggttggagcaggtggtggatcctcggcgggcggaggagggccagcggatctggccaccggtggctccctggacggcaacggcgtgggcacgacgcccactgctggtggtgctggtggtggtggatcatgctgtgagaacgggcggcccataatgaccgacccggtgtcgggtcagacggtctgctcctgccagtacgattccgcccgcctcgccctctccagctactcccgtctaccggcggccagcgttggcgtctatggaacgccgtacccctcaacggaccagaatccctaccagagcatcggagtggacagctccgccttctattcgccgctgagcaatccgtacggacttaaggatacgggcgcgggtccggaaatgggagcttggacctcggctggacttcagcccactacgggctactactcctacgatcccatgtcggcctacggaggattgcttgtttctaattccagctatggagccagttacgacctggctgctcgtcgcaaaaatgccacgcgggaatccacggccacattgaaggcctggctaaatgagcacaagaagaatccgtatcccacaaagggtgagaagatcatgctggccatcatcaccaagatgaccctcacccaggtgtccacttggttcgccaatgcgcgtcggcgactgaagaaggagaacaagatgacgtgggagcccaagaatcgcacagatgacgatgatgacgccttggtgtcggacgatgagaaggacaaggaggatctggagccgagtaagggcagccagggcagtgtcagtttggccaaagatgagaccaaagaggaggaggatgccatagatgaggaccaaaagtgcctcggtcaggcgaacatactgcgcgccggctttggttatccctcagccggaagtggtagtggtggttaccccggcggaggtggctcctccagtggccaccccggtggctaccatccgtatcatcatcagcatcccgcttactatcaggctggccagcagggcggtatgttgccatttcatggggagaactccaaactgcagacggatcttggggatccaaaaaaccagctaggccgggactgtggcgtgccgattccagctaccaagccgaagatctggagtctggccgacacagttggctgcaagacaccgccgccggcttacatgggtcaccaatcgatgcctctgcagcagcagcagcagcagcaacagcagcagcagcaggcgcagcaccagtatcctccatcggaggcaggacgagatcaacagctgttcaatggggccgcagctccatacctgaggccgcacaccacggcctacgggggttttctaggggctacgacccagcaactgcatactacgaacaacagtatcccctacagcaatatgcccccgcagcagcagcagccgcagcagcagcagcagcagttgcagcagggcggtaccatccatactacgggaagttcgagcggaccaataataccgctgcagttccacaatcggcatccgcagcagcagcagcaactgcagcagcaatctcaatccacagcgagtcagcgggcgatggggtttctcgaagcccaaccagatactccaccccaaactccgccgaatatgaaggtgctgagcggagctttgagtctcctgcctaccgctactcaagtccctatgaccgctacctgtcgcagtagtaacgcctttggcttccccgccagcggttacccgatgaatttctcggccagattgggggagtattcgccgcgtgatgattacagcagcgggaacagcagcagcagcagctcctcatcgccgcagctgcaaaggaatgaggccatgttcaagccgctcttcaagaagttcaccaactaa

SEQ ID NO: 42666 - protein, 717 aa, DROSOPHILA
MAAYTQFGYGGFPSASQLLPPSVQTTEDASANVNVNVNEALVMTNAPAMSPTGGQDCQGSQPSGGAGGDASSGALSPNALSQNSNAATVVGAGGGSSAGGGGPADLATGGSLDGNGVGTTPTAGGAGGGGSCCENGRPIMTDPVSGQTVCSCQYDSARLALSSYSRLPAASVGVYGTPYPSTDQNPYQSIGVDSSAFYSPLSNPYGLKDTGAGPEMGAWTSAGLQPTTGYYSYDPMSAYGGLLVSNSSYGASYDLAARRKNATRESTATLKAWLNEHKKNPYPTKGEKIMLAIITKMTLTQVSTWFANARRRLKKENKMTWEPKNRTDDDDDALVSDDEKDKEDLEPSKGSQGSVSLAKDETKEEEDAIDEDQKCLGQANILRAGFGYPSAGSGSGGYPGGGGSSSGHPGGYHPYHHQHPAYYQAGQQGGMLPFHGENSKLQTDLGDPKNQLGRDCGVPIPATKPKIWSLADTVGCKTPPPAYMGHQSMPLQQQQQQQQQQQQAQHQYPPSEAGRDQQLFNGAAAPYLRPHTTAYGGFLGATTQQLHTTNNSIPYSNMPPQQQQPQQQQQQLQQGGTIHTTGSSSGPIIPLQFHNRHPQQQQQLQQQSQSTASQRAMGFLEAQPDTPPQTPPNMKVLSGALSLLPTATQVPMTATCRSSNAFGFPASGYPMNFSARLGEYSPRDDYSSGNSSSSSSSSPQLQRNEAMFKPLFKKFTN

SEQ ID NO: 42667 - DNA, 2625 bp, DROSOPHILA
tcctccagattctgctggcgcttctccgcatcctccgcctcccgttgcagcttatcggcattcttgtgcgactccctgacgaacagtttctgaattttcttcagctgggacttggcagccggctcgtagggctccgctgcattcggatccttggtgtctacgtaaatcgtgggaaagggttccttgcccgcatgacgcatcgcctgcaggatggtcttgaagggcttggactcactgccatcgccggactcatcactacccttcttttccgacgtaaagattgcacctgcatatggtcgtacatatcaacattgcacattatgaatcgatacatctggttcgctggcaacgtggaccaaatagttggcccagttctatcacttaaaaacgtgcttacccaaggttaactcagccaactgatcggcgggcatcttgcttgctttgtgactaagagtttactaagaactgaacttaaatatcgctaatatacgcacaaaattgcatcagcttcaagttgacaactttggcaaaacgatacctctcgccggatactcgatagacacgatgcaaagcaagtgctggaaaacgccgattgtcaagtggggggctgaaagtttaaaaatgcaataatttgatttttggacgggaaatcttctattacattataaataattgtgtttatttcttaaaaaatatttctctgcataaaagggttttataaaaacaactatccctatgaacgggaatcagtatgtattgtttataaatgagtattcaacattattttggtttttgagcaataaagttcgacgtcattattgttatatctggtttttttatgcaaaggtctttaatcattatttttacctttccgatattttaaagtaactaaatctggctataatatatcgcctcatttgcaagccctcatttattatcgataaatataaattccttctcaccttcgtgagaaaacgtaaacaatttaagaaaacagaaaatgccctcggaaaacaggtgattgcagcataagtacttgcaaaactaatttacgaaatgcagctatactattgccactcaacagaatcaaaatcctacccaaggcggtggtctgcgaggagagcagcctgcgcggtgacatcaccttctcgtcgggctgtgtggttcatccgagtgccaccgttatcgccgacgcaggtcccataataattggggagaattgcatcatagaggaatatgccaccgtagctcaccgcttggagccgggcgccgtttgggatgtcaacaatatcctgagcattggcactcacaatgtctttgaagtcggctgccaagtggaagcggccaagattggcgataagaacgtcttcgagagcaagtgctatgtgggccccggtgtcactgtttccagcggttgtgtggtgggagctggaataaagatccatggtagtcaacgcctgcccgaaaacacgattgtttatggagagcagggcctgcagcgcgaggccatcgacaagcagggatcgcagaccctgcagatcgacttcctgcgcaaggtcctgccaaactatcatcatctacgcaagcccaactacgatcccaagaaggcgcgcagcgtggtttagttttaagtattctttatacatatatatctaattttccactttcattgcattaaactcggccatctccttttcgaacgtaacgattgtatgatcacacagaccctccagatcctccagtccccgtttaagtatatctatggctctgtctcgacgggattgaatgcggaagtgcagcttctgctccgtgggatgcggaatcgtgtagccacagaaatccacctccgggtagcgggctatgatcgttttcagcgcatttcccagcgtgtggccctcgttggtgaacacaaaagtacgagatccttcgccgtttttctcatcaccagccagctggggaaagtatttaagaattaattactcacattgcatatttaatgcattgtctacctctgccaatgctcccattttcagtttgttcaaatactcgttcgtttgtttacaaaaaacgtgcagggcacatgcctcggcaatcgatgttagagtcatcgaaacatatcgatttaagtagctaaggacggcttattccaattggaatgcaatgtagctaaaaactagagatgcctatcccattttgaatttaagtaaaacttagccatatcttcccgaaaaaactgttaaatttaagttgtgtatgtataaaagagtatgtcttctgaaacattcctactgtttgcttgtgccaagtgtcataccaacattgactttaattcttgaaaatcaaatgagttacttctaagtaaatgcataaataccgtggtaacgtcatcgatgtatcgatagcgcgccgatgtctccaccagctccagttcttgacgcgttctgacacggacgcggttttcagacagagcattgaattgtgtgtgttgcttcttaattcgctttgttctgtggccaattttattgggccaactgcgaaatcagttttgtgcggtgtcggccaaaaaaaagaagaaaaagtgtcgcaaacagccgcattagcataattgcaagccgccttctgcat

SEQ ID NO: 42668 - DNA, 558 bp, DROSOPHILA
atgccctcggaaaacagaatcaaaatcctacccaaggcggtggtctgcgaggagagcagcctgcgcggtgacatcaccttctcgtcgggctgtgtggttcatccgagtgccaccgttatcgccgacgcaggtcccataataattggggagaattgcatcatagaggaatatgccaccgtagctcaccgcttggagccgggcgccgtttgggatgtcaacaatatcctgagcattggcactcacaatgtctttgaagtcggctgccaagtggaagcggccaagattggcgataagaacgtcttcgagagcaagtgctatgtgggccccggtgtcactgtttccagcggttgtgtggtgggagctggaataaagatccatggtagtcaacgcctgcccgaaaacacgattgtttatggagagcagggcctgcagcgcgaggccatcgacaagcagggatcgcagaccctgcagatcgacttcctgcgcaaggtcctgccaaactatcatcatctacgcaagcccaactacgatcccaagaaggcgcgcagcgtggtttag

SEQ ID NO: 42669 - protein, 185 aa, DROSOPHILA
MPSENRIKILPKAVVCEESSLRGDITFSSGCVVHPSATVIADAGPIIIGENCIIEEYATVAHRLEPGAVWDVNNILSIGTHNVFEVGCQVEAAKIGDKNVFESKCYVGPGVTVSSGCVVGAGIKIHGSQRLPENTIVYGEQGLQREAIDKQGSQTLQIDFLRKVLPNYHHLRKPNYDPKKARSVV

SEQ ID NO: 42670 - DNA, 4936 bp, DROSOPHILA
aaatgcgttcacaattatgtttcgggtctgcggccaggattgatgggtgtataaaggcttcttttatgcggtaattgagtgtggatgaaccaacctctttcaatggctttattatgcccacaagatttggtttggcttgtgcggtttccaacgatctgaaatcggaaaacatgggccaataaactgacgaaacaataaactggaaaatttaaatggtctaaatcttttcttttacgtttttatgcttggttgtttaggcaattactccagttaattcttaatttgctctgccatttttatccaatttaaagctcataatttgtatgcgattgtttcatttattgatttttcatgtttcataacgatcttttctggttttcatatatataataataataataataatataattaaacgttaagtaaatgttataaaattgattttgtttttctgttttttttttttgttgttgagaattgcagtaattagctctataaatatgttaaacttacggcatacgttacaaatcgatttacacataaagatgtatgtatacatataaagcctatacacgtacacaatcaatatatccatatacatatatccatatatttatatgtatataattcacagagtttcaaagtagttgaaatcgacccagtaagttaagactttcatatgtctatgtacacttgtttaaattagctacatttttaaggtggttttagagtgggtttaagtatgtatagtaagttgtttataaagtttttgcctttaagttgtatttattggtttgtattttagttaaatgtttgatgcttcaccgtctttttccattgattgcatagctaatttttagagtttcgtttagtacatgttgtgtcgaaatggtaactacttaataatagattttccctctcggaggcacgcttaagtaagagttaaagtaagtttatcatttaacaacgaggaaagcaagctctctaatctcttacgattcctaagagcttattgtaatggccttggagctgttgttgttgttgccgctgctgctgttgttgttgctgatgttgctgctgttgttgttgaagttgccactgtccttttccagattgacggactgatcgtcgctattgggatactcctcggtatcgccctcattgccggccagactgttgggcgtgtagactcggttcatgaacttccttatgtcatcgaagtactcctccctttcggcaatgccactggaactgggcgaatcccggaaattgttgccctccgactcgtgcttctttacgtgccgatcgagattcgtctgctggccaaaggatctatcgcagagctcgcagcgaaaaggacgctccttgttgtggatgttcctcacatggcgctgcaggttcgaggatatactgaatgcccgatcgcagtacttgcagggatacggctgctcgcccgtgtgcgtcctcaaatgcctcgtcagattggccgatctggggaacaccttgccgcagaacttgcagctgtagcgatccttcgtcttgagtcccaccacactgcccgctgagaacttcacgggcggaagcggccgctttggggcagctgcactggcggctcccgccagcagcgcctcaatgccgcgccgtccgcccggttggcataaaaaaggaaaccccgagcggtagatctcctccagcaacagcggatggaaggtgggatgagtctgcggaagcgttggccccgatgccagagcgctgtggtccgctgcgaacgctgctgccgccattgtcggtaccgctccgccctcggacgtgctgctcagctcaccgcccgcacttgtgggtggcgacggcgaaggagtgaggccgggcgaggcggtgggcgtgggcgtgggactgctgcccttgtgcgacttctgcgaggtggacgactccgccgagctgtgtgatttgcgcattttcagcggctgccccctttcggcttcgaattcgtgtaatctgggcataaacctatggagcataaggttgtcctctgccggtgcggtaaagaatgatccagccgagcgtttgcggcagatggaaaggtccaacggtccatctcctccagagggtgtgtctgcgggcggtggtgtgctcatgatgtcaatggatttctgtgggcaaagcgaatacgggttagcaaaatttaaggcaaagtaactaactagttttaaaatcaatataatattcaaaaatgtattttaatttcgtttgaaattttggaaattattttggaattcccttgtaataagggtatttctttggcaacttcagaagaagaaaacgaactaaaatacatctgtgtatctcttttgaacttaccctatcatcctcggcctgctgttgatcgggagtgctaaccctttcgggttcctgcttcatatcgtcctgctcctcagatttggagtcgtttctggtgtcctccaatttacccttaatgtccagggaactccggctctcgtcctcttcgccttcgaatgcctgcacaagtggctctttcttcagtttttcttccgccttgaagaccaactccttctccgtaactttgtcataggcctgcgattcactgttctcaccctttagaaagccaaatggtagtttctgatcaaaggcggaaacgggagaagtgatctccggaccaccgcaacccaaatccatgggatttttcgagaaaaacatcggaatgttcgtaggatgcagcggattttgtggtagaaaggggggaaatccgtaaggcggaaatccgggaaagaaagacggcgcagtgcggaacattaggaaaggattcggtggcgtcgacatggcggcaacggcggcagctgctgctgaggacgaggactccgaagattctcttggtggcgctggacaggtggatgtggcagtggcggccaggtggggctgatgcggaagtgggtgctggtgcggatgctgatggtggcgattcacgtgctggtttcgatacggacccggacccgttgaatcacagaactttttgtgcttggtcagggaggtcaacgtgctgaagctctggttgcacttgtcgcacttgatctgcatccgacaggtggcgtgcatccgcttgtgacggcacagattcgagaattgcgtatacgccttggagcacacctcgcaggcgaagggcttcacggagctgtggatgtgctggtgctgcttcaggcccgacgaggttccgaacgttttcccgcactccggacacggatgacagcgagctccgacgtggtaggcgcgaatatgccgctgtagattcgaggggtcacaaaatacctgcaaaatacggatcacagagcaaagcgaacggtgtgagttgcgattggttgttggcaataaaataaaaaatgcgtacactgtagcaacaaactcagcaataaatggtatacaacatctaatatatataagtagtttatattacaataaaatgtgtcatactttcacatctttgttatttcttagttttaattgaaactttacataaaagttatattactagttttggattggctttttctaaatacaaatttcttcctctgtacgaagtagtgaactggtcgggtgatctggttccaaatccaaatgaaacgaaactgaaattaatcaatcatctggtggtggtggtgctgctgctgccgcttttgccgcttaaacggatctcttatttgggctagacaataaccgacgctctccgagattacgcaaaggtaaccagagcaacggcggcgaatggcaacgacatcatctccacccacttggcagcagccaaacaccttcgtcaattattaacatcaattgctacaattgtcattgcctggcccgaatcatccatcaccccctggaaggtctccaagcggagatcagggctggacaatagaagtccccccttcatatgtgaagccaaaatgggaaaacaaggtggcacaaggctaatcatgaaagtcacaaaagtaacgcaacaaggtaggactttacatctaaatgctatgcgatatattcaattttttttttacaattaattggaaaattatattttctctatattttaaactaattttataaaataagaatttttttttaccaatattgaccgaccaatactgcgaccagccctaagtcagatgtgctccatgtgaagctcgcacatttcgtacttcgaaggggcgaaggcaatgacagatcgggctcggattttgttgtggaggatacgggggcaggtggggcggcgggggtgtttccatggggcaggggatccagcctggcatccagttttgtgtacccacttcaaacttgatttcggtcagccgttgcgactcccccgtcgcctttttacgaaactgttatgcctaatcatgctgtcataatgcgctacgaattcatatcaaacgatgatcgaggcagccttttttgtctatctccatgagccacacaaaaggtggaaaaccatgggacggggggattggtgggtataagctgaggcatccagggaagccgaagtgcgagagagagagaggcgacatacaagaatagctcgtgctataactacatcaaatggattagattcaactactctccaaaaaggcgaaaaacgccacaatagacaacgacaactacagaaacattatatatatatatatataaagacaacgatgatctcggtgttacagcaaaaaaaacaactaaggaaaaaaacaactaaagaaacagtgaaaaaatcaaaacaacctctggatctttacagaagcatatgtaacatatatcatctaatatttatctagtggaatgatttatattcagtaaatgatatttttagatgataagttctgggacttaggatcaaagaaacaaaactttctatatttttttctgtgtactaaaaaatgaaaagcagt

SEQ ID NO: 42671 - DNA, 2142 bp, DROSOPHILA
atgaaggggggacttctattgtccagccctgatctccgcttggagaccttccaggggcggcatattcgcgcctaccacgtcggagctcgctgtcatccgtgtccggagtgcgggaaaacgttcggaacctcgtcgggcctgaagcagcaccagcacatccacagctccgtgaagcccttcgcctgcgaggtgtgctccaaggcgtatacgcaattctcgaatctgtgccgtcacaagcggatgcacgccacctgtcggatgcagatcaagtgcgacaagtgcaaccagagcttcagcacgttgacctccctgaccaagcacaaaaagttctgtgattcaacgggtccgggtccgtatcgaaaccagcacgtgaatcgccaccatcagcatccgcaccagcacccacttccgcatcagccccacctggccgccactgccacatccacctgtccagcgccaccaagagaatcttcggagtcctcgtcctcagcagcagctgccgccgttgccgccatgtcgacgccaccgaatcctttcctaatgttccgcactgcgccgtctttctttcccggatttccgccttacggatttcccccctttctaccacaaaatccgctgcatcctacgaacattccgatgtttttctcgaaaaatcccatggatttgggttgcggtggtccggagatcacttctcccgtttccgcctttgatcagaaactaccatttggctttctaaagggtgagaacagtgaatcgcaggcctatgacaaagttacggagaaggagttggtcttcaaggcggaagaaaaactgaagaaagagccacttgtgcaggcattcgaaggcgaagaggacgagagccggagttccctggacattaagggtaaattggaggacaccagaaacgactccaaatctgaggagcaggacgatatgaagcaggaacccgaaagggttagcactcccgatcaacagcaggccgaggatgataggaaatccattgacatcatgagcacaccaccgcccgcagacacaccctctggaggagatggaccgttggacctttccatctgccgcaaacgctcggctggatcattctttaccgcaccggcagaggacaaccttatgctccataggtttatgcccagattacacgaattcgaagccgaaagggggcagccgctgaaaatgcgcaaatcacacagctcggcggagtcgtccacctcgcagaagtcgcacaagggcagcagtcccacgcccacgcccaccgcctcgcccggcctcactccttcgccgtcgccacccacaagtgcgggcggtgagctgagcagcacgtccgagggcggagcggtaccgacaatggcggcagcagcgttcgcagcggaccacagcgctctggcatcggggccaacgcttccgcagactcatcccaccttccatccgctgttgctggaggagatctaccgctcggggtttccttttttatgccaaccgggcggacggcgcggcattgaggcgctgctggcgggagccgccagtgcagctgccccaaagcggccgcttccgcccgtgaagttctcagcgggcagtgtggtgggactcaagacgaaggatcgctacagctgcaagttctgcggcaaggtgttccccagatcggccaatctgacgaggcatttgaggacgcacacgggcgagcagccgtatccctgcaagtactgcgatcgggcattcagtatatcctcgaacctgcagcgccatgtgaggaacatccacaacaaggagcgtccttttcgctgcgagctctgcgatagatcctttggccagcagacgaatctcgatcggcacgtaaagaagcacgagtcggagggcaacaatttccgggattcgcccagttccagtggcattgccgaaagggaggagtacttcgatgacataaggaagttcatgaaccgagtctacacgcccaacagtctggccggcaatgagggcgataccgaggagtatcccaatagcgacgatcagtccgtcaatctggaaaaggacagtggcaacttcaacaacaacagcagcaacatcagcaacaacaacagcagcagcggcaacaacaacaacagctccaaggccattacaataagctcttag

SEQ ID NO: 42672 - protein, 713 aa, DROSOPHILA
MKGGLLLSSPDLRLETFQGRHIRAYHVGARCHPCPECGKTFGTSSGLKQHQHIHSSVKPFACEVCSKAYTQFSNLCRHKRMHATCRMQIKCDKCNQSFSTLTSLTKHKKFCDSTGPGPYRNQHVNRHHQHPHQHPLPHQPHLAATATSTCPAPPRESSESSSSAAAAAVAAMSTPPNPFLMFRTAPSFFPGFPPYGFPPFLPQNPLHPTNIPMFFSKNPMDLGCGGPEITSPVSAFDQKLPFGFLKGENSESQAYDKVTEKELVFKAEEKLKKEPLVQAFEGEEDESRSSLDIKGKLEDTRNDSKSEEQDDMKQEPERVSTPDQQQAEDDRKSIDIMSTPPPADTPSGGDGPLDLSICRKRSAGSFFTAPAEDNLMLHRFMPRLHEFEAERGQPLKMRKSHSSAESSTSQKSHKGSSPTPTPTASPGLTPSPSPPTSAGGELSSTSEGGAVPTMAAAAFAADHSALASGPTLPQTHPTFHPLLLEEIYRSGFPFLCQPGGRRGIEALLAGAASAAAPKRPLPPVKFSAGSVVGLKTKDRYSCKFCGKVFPRSANLTRHLRTHTGEQPYPCKYCDRAFSISSNLQRHVRNIHNKERPFRCELCDRSFGQQTNLDRHVKKHESEGNNFRDSPSSSGIAEREEYFDDIRKFMNRVYTPNSLAGNEGDTEEYPNSDDQSVNLEKDSGNFNNNSSNISNNNSSSGNNNNSSKAITISS

SEQ ID NO: 42673 - DNA, 2801 bp, DROSOPHILA
atgatttgaaataagttgtaaatcgtgttcttaacttttctccgtgtaaaggacattgacagctggctcccggaaaggaaaacccgaaaacgccacaacatttattctttgacgccgggatgggactggcggagagtgcgagaattctattagcaccgtcaaggaaatcgctttttctaatagccaagtgccacgtgtcctgcgaagcttgagtcccctgctcagtcgtgtgtcacgaccgaaggacaaccgcagcatccttctcactcccgctgcaaaataaatgcttcccagcccggcaaacaatacaattgaaaaattataaaaatttcgcactttccagaaatatacagtcgaacgaattctcgtagcgaaaaccggacgtcgtcctcttgcggctgcactgggagatacacttgttgtcggcaaaggacacgcgtcacagatggaaagagcgggggaaatcgaaaggaaaaggggatggccagacatcatcaatattgcaggaatcgctcggcagattgaggctgtcaaataagcgtgtctaatgcgtattaagtgctctccgtccggattcatcgagggttgtccgtatggcccaatagagaagttggcttaatcacgctaatagccgcaattcatgcaaatgctgcagacaataaaatatgcgttgggtatcagtcaagtcaattcgagtcaaacagcaaggtcaaatggcaatgaatattgttaggtgattgcatttggggttggctctcaaatggtaaatgaatgaaataacattctgggctttaagtttaaaggttgagttagaaattatgattcccgagatactttctcaccaccattaaaaatctcatttttttggcgcatcttcttctgatttaattttttagccaattgattgattaatgatttcttttcttttatcacatagcaatgaataagtctataaaatggcttacaaaactaacctaaagcggccctgctgaaccaaatagaaataacaacgttatcagcccccagcttccccgtttctcaaggatcaccacattcctagaggaacatttcaatgggatctactaaagcatttaggagaaatgcatcccattgaattgctggcgatcggttttcaccatgttgttgtacttccacttgtcagcactcgatgcttgactgctccaagatcccgatcctgatcccgaacccgatccagagccgctgctcgacttggagtggttctgacccttcgtggactggttgtcctttgtggtgctgctcaggcacttgtcggtacgttcggtgtagaccattttgtctctagatctagatagcttccttctttttgaataggtacaattttctgccgattacacaaagctgcgcttccaatgcgtttgtagagaagtcaaagttcacggtacagtttgcaacagggtgagtactttaagttccttgttgttggccgagtttccagtacgtgatccttttttcgatgacagatgtttgcccaatctattcaaattaaataagcaaggatttgtattagtaacaattcatataaattttttttttttaactggacattgcaaatgctttcacaattatgtacaataattttaactggctctgtctggttttttacccaccttgcttgcttcaacaatttttgtttggaatccgtgtggctaatttttggcattgacacaaaacttttgcaaattgcacattggatggaaaagaaaggaaatttcacagctcacgctccgttcagctcgttaccgatctgctctgctctggactttctactgaccctccagcggcttccacaactggtttaaatacgccgaaccaatccgttccgttccgatgcgatacgatctccggcgatccgagtgcaatgtctggcggagcaactgcgtcaccgttctaccagcaagtagcgtcaatgtcgctgtgccagctgcaccatatccaagccgccagaaaccgccctcgcaccgcccccgcaccactccctccccccgttgacctcaaactcggtctccgtctgaggctaacccgttccagcggacgacaatgcaaattagagctctagagcaactggtttaatccgcgaaaacgaaacgaaacctttgcaagcaactccagcggccagcaacgaatcgactacaagataccatttaaaacaatagagacacatggtacaagtattgtttaattatatattactatatagagattttctgaatattattaggtttaacaaaatgcttgaaatcaactgttatttgctatgtactattaataatcgtgttaaagttttgcacaagtaatagtactttttgtcattcaaaccttttcattaggtttaagcaatataataatttttgtgaaacttcaaacgcttttccaagcgaagcctctcttataagcggtattaccagggtataaaacacccccagtaaaacctgctatgtatcacgtagtattttcctttgtctcctctcaacaaacatgattattaagactcgaaaaatgtttagagttgccggccggcggttttttgacacgtcatccaaaattccgcaaataggacctttgctatggtatgtagtctctaaaattctgatattccgtagcacggcgatgcattcgagtatctgcctatatatgcatctataatgattaacaatatcatccgatcactattgatattacgaattatgcatgaaccgatggctgatgaaaagtcttggttgcattgcatcagccaatttgatgaagaaaacaactcgaaa

SEQ ID NO: 42674 - DNA, 667 bp, DROSOPHILA
tccagagcagagcagatcggtaacgagctgaacggagcgtgagctgtgaaatttcctttcttttccatccaatgtgcaatttgcaaaagttttgtgtcaatgccaaaaattagccacacggattccaaacaaaaattgttgaagcaagcaagattgggcaaacatctgtcatcgaaaaaaggatcacgtactggaaactcggccaacaacaaggaacttaaagtactcaccctgttgcaaactgtaccgtgaactttgacttctctacaaacgcattggaagcgcagctttgtgtaatcggcagaaaattgtacctattcaaaaagaaggaagctatctagatctagagacaaaatggtctacaccgaacgtaccgacaagtgcctgagcagcaccacaaaggacaaccagtccacgaagggtcagaaccactccaagtcgagcagcggctctggatcgggttcgggatcaggatcgggatcttggagcagtcaagcatcgagtgctgacaagtggaagtacaacaacatggtgaaaaccgatcgccagcaattcaatgggatgcatttctcctaaatgctttagtagatcccattgaaatgttcctctaggaatgtggtgatccttgagaaacggggaagctgggggctgataacgttgttatttc

SEQ ID NO: 42675 - protein, 73 aa, DROSOPHILA
MVYTERTDKCLSSTTKDNQSTKGQNHSKSSSGSGSGSGSGSGSWSSQASSADKWKYNNMVKTDRQQFNGMHFS

SEQ ID NO: 42676 - DNA, 6629 bp, DROSOPHILA
cgcggttgttgttgcagttgttgttgcggctgtgggtgcccctgcagttgttgccaccgacgatgctactgcctgttcctcttcagctgcagctagcattatacgtgcatttgttgttgggttatttgcgttgccatcgcctgactgcagttgttgttgctgttgtgtgggtaaagtgttgccgtttgtagttgttgctgctgctgttggttccactggcgtaattgttgttgttgcttctcgctgtgcgcttgtagttgttggactggcatttccgcgggcatttgcgttgttgttttccactgccgacgctttgtttacgcccttttcaggcgtctcccgctgcttggaagccccgaccgctccttccagtggcttcttctccggttttcgtacatttcccgtggattccttgccgccgttggccaattctacattattttcgccacctcgagtgttctccatgtgtttgtgtgtgcagtggcacacacacgcgcgtatgggtgtgtgtgcgtgttgccctacgcctgtattgaatatcgatcagtcggccgtctacgtgacgcctctcagctagccgtgtcttttatcttacgctccgtttgcaattcacccgcgccctcttccactcgattttcattcgactggcagaatttccgcagcggcgttttcagcgattcgcgaatagtttttttttttgttctagaagccgtctcgcactgtcgtttttcaactctagtcttcagatgtggagcgtttgtgcacactagtcaataaacagtgttctgttaggcgccatctagcggcaacccgcgcagatagacttgtgaatgaaagaatagatggatatatcgtaacatcgattgtaacgtgtaagtgcgccatctataggcgagtcatatttggcgcgttatttaaaagtgcacattttgtaatttgttactgcctttttaaagatcaaaatatataaacattgaataaatacaatttaaatgtgctttcaacactcccttgttattttttgctctttttcagcgagtggacgcttaaaagcttttttaattaattccgggaccgtaactagatactccatgagggacatttcgtctttcagagtgttcagatacatgcgctgaatgttcctgataaccggatcaattactttgttaatatctgcatcagtaggactgtctcttagatccattttggtaatagctgcatcaccaggactgtcacttacatccacattggtaatagcggcatcactaggactgccacttagatccacgagttctaaatcgtcaacccctagggtatctaattgggcgcattcggcagtgggatccactttctcggcttgcgtatgagacgtaatttgtttgctctttttgggcttggtactgcgttcttcttcggatggtacttcctccctcttatccttcacttcaagtgtaaacgcattcaaggcctcttggacctctatttgggaccgaacagccgctctgagatcgtctccgcttttcgcactgatcacggttattctggatggtttcgattgggattcgttggaggaggaacacttactgcatgaaggaaacttattctggaatctttcggcagcagcctggcaatgagccttagctgcattaagtaaatcagagtctttcttttgcttctggtggtggtttaaacgatgtggggttatgttattataaccaccctcgacctcacactgctcacttttactagatgggtccgcttcatagttttgattcttatagagaaggtagtccccacagctgtgttctatgactggtttctgcctttttctatcattaaggagatatgctggaacaattgcttgcttgggtgtgtaatttgaactgggttgcatcatcacctttaatttcgactggtgtttccacttccgtttgttaaggtatttgaaattaaaaaaaaaaattaatttcattattgctgcttaccttctcattttgtgccgggtgataattaacattgaaacattttttggaaaacaaatactgagcatggtcttcatggttagaaggagactcacgatcctcccacgaatgatcgcaataatagtcctgccgtatctgattttgatttgtcgtataattatgtttgtaggacttttgcacattctctgaagacttcattcgttccttgcggtaatggtcccttaatttatgctccttgtgctcattgagttgctgcattaaatgtattgcaactattaatgttagatctttttattccaaagactcactgatggtttctgcgccccatggtccttaaagtgcttacaacatttgttttttttctccatagtctaagattagagtagattgatcaggcgtactaaatatattttttttattgtcaactataaccccgaatactagactaagcttaagcttaatgctacaagcctcaaaccatttttaactactggataaatagtttttatttcgcatacattatgtatatagagattgccctccagtcttaaaagagaggaaaggaagttacagagtgatggtttccatatatcgctcaaaggatctggtgattactgtgtgatcgggagccaggtgggtatccgccatcacagccagtctgtatttgtccccaaagcgatgaagatttaaggaaaggcaggtcttcgattgtggtggccggaaaagtagaacatcctggacattctgaccccaggccgcttgaaactcagcagtcgctccgtagatttcagtgattgtgattggaaagttgtatgagaaaaagttgatgaatattttggtaattacgtgaggcaaaagggatgtgagaaggctgtacttggtctgtccaatagacgctaagtaaataatgatctgttgctttctgattcgttcaacaatctgatggagttctttggtgtgatttgcgtctggttgccttagaggcaattgcagaaagacaacacccccgatattttcagatttatccccactgcgatctgtgaaataccctttatctatggtcctacaagtggtgttcaagtaattggggactttcaagtcacctgagaacgtattaaagtaatcgtgaacagcccctgccaagcaagttaaactaaagtcggattctcggagatcactattgaatttaccctgattacgggtcctgagttgggcgccatttattgatcggctaaatgagactattttcctgcccgcataggattttttatgcaaaatgtttaactcctttgtgggctgttcgaaaagcacttcgtaaatgtttcgtggggcctggaaaagttcccatataattttgaaaaactccaattgggcgtaaagtagaaggggtacgtacaagtgcagcctggcgcaataggtggaagtatgggaagttttacctttgatcagaacatcagcgaaagccaaaaactcacagtaaatgtgatagggtaagagcaaaacatgatttagatttagacgccaaaggaaacgtgtcaaggcctttgccaaattagttggctgcatgctcttatagatcgcatttctggcaaccgaccaattaagatttctttgatctaactccctattcagcagcaatcgcattgtttgaaaacgacccacttcattgcggtagctgactgaacgccttttcagtttcttaagcatagttcgactccttatatagcccaaaattacattcaccaggacaattacgaccaacgacatcaactggcttaggtttccaacctgatcactggacgttgaaccatcgggggtttcaagagattcaaattcgtagatgaacttttgccaacggcaaatgataagatggattatatgattgatgagtctgcttatgtgttccggctttcgcacaaagcgggaaagttttggactcgaactgtcccaatccaatccatcgcttagggtcattgtggttttcttatggggatcctgaagcaggagcatctcactcacatgcagatcctcctcctcggcaattatcaggtggtgcagcttaatgagtatgtagtagggctgtgtgctatccgagttggggatcacgatcacctgccactgggggagatcggatgggatgtacttcgtggccagctcgctgacatactcctgaatatttgattcgctaaccggacgacctcgatacttgtgggtgctgagtaagacgtggttgttgatgttgaagccgctgcaagaagagaattgccccttgaatttatcatggtatatgatatgttgaagagcacacctgctgtcattcacccacgcataatgcccccaacaggtgacaagtttttgacgcagcttggggaacctgagcatcccggtcttgtccctcaggtcagtcagatgctgggcataggccatccgtatccgctcgaagtcacagtcgccctccacttgcagcaggaagtgaaatacgcccgcattcttcggcgtgtcgattaaggtgcggatcttcttcgactttgagatggtcaggttcgggtacttgatgctcagcacatagttggatagttcgttgccaaagtgagcacctgggaatatggattgggattagaagtgccgaaatttaatagctcactggccacctctagcgctgtattccaatctgcgatcaaagtcataacattaaagaagcctataacgtaaataataacaaaatatttaagcagtgggaagcaatttgattcccgcattcttgataccctatttggaaaaagtaaataagaagaatgataatcagcgcggtcaagaatcgtataccatgagattaaatcaattgaatttaatggatggtttcagcccccagcccgataaacctaatcaagcactagactttcctatacaacatcatccccgacgattagcgggtatcatcaagcgcagcgaagactggtcttatcaatggtgaaatttttatgagtaattcagttggtcaaggttcgcttggtcgcttgtctgggttccgcaaaggtgcaacaggtaatctgttttatttataaacaaaaaccttatctgcagcactttctccacgactctctcactttcctactgctctgctctctccctatgcctcctctataactaactatctttcgttcttaggtttccaccggcggatgatcctttggctgactgagaatcggttaatcaacccatggatcgtttatttatgtggccggccccttttgaagttattgatttatgcggcttatcagcggggcagcgcgtgtcgcggatcggcgatcttcgatcactgcaggggatgtatgtcgagcacttacacaggaatgataacatcagcaaaggcactagcatcatagccaccacaaagcagaagacggtcttcagcagagacttcacttcctgccagaaactggaaggtactttgttagctacttctatgtactaatcacttaatcacttgaaatctgcctagttctacctttccattttcccagactcgttcgtttgcagaaactgccttctaagcaatccgaattatagctgcactatagtatgtacacctccgataccccgatctggcttggatttttttccagaagctcacacgttcgattctcccaaagtttcgaatacaactgatcactggggacgaagctcagcgcgagattcgttttattgagcggcttatcagcaaattgaaggcagtcgctcattcacttgcactgcaatgcaaaattaaaacgtaatcaattttgttatcaaaacaatatgtttgagcatttcaaatcgaagcgggagttctattctattgaaaatcaaattctatgatttaagtagtaataatacttaatattttccacaagaacatatacttatttgaggaaaatatgtgcagaaaataaaaatagtaacaatttgaccaatggctctaagattattaacatcatgcttgaaacctattacatttaatatttaattgaatatattaaagctgatttctggtgaaaaatatattgactagaaaattaaatgaaaaagtgatgataaaataattgttaataaattgttgtatatagttttgcgttggtattggtggctctctgagctggttccgtgaacttttgtcgcctctgtaaaggataagtctctctctcttgcgcgctctctctctctccctctctctctctctctttggcttttactttctctccttactcagtttccattttggggctctggagctcagtcgtttgctggctttcaacgctgtcggttcgttggttttccagactttccccgctctcgttcctgtgttggtgtcgcgttctttcgacgttcgttctgctgctttgcattcacacgacccccgaccagccacgccccctcccagccgccccaataatatctgcgacgtgcgactgtgtgagtgttttagcaaatgttgaaaggcagtagaaacgacagcggaggcagcatggcccaaatggttgggcgaggggaaaggggcgcggtggttggcaaatgaaaagcccgtggaaagccgtgcatactgagtaatgattttcgtgcgagtgtgtgaaaatgaaaattgttttgctgcgcgtgttaactaaaaac

SEQ ID NO: 42677 - DNA, 2248 bp, DROSOPHILA
gagaatcgaacgtgtgagcttctggaaaaaaatccaagccagatcggggtatcggaggtgtacatactatagtgcagctataattcggattgcttagaaggcagtttctgcaaacgaacgagtctgggaaaatggaaagagtttctggcaggaagtgaagtctctgctgaagaccgtcttctgctttgtggtggctatgatgctagtgcctttgctgatgttatcattcctgtgtgctcactttggcaacgaactatccaactatgtgctgagcatcaagtacccgaacctgaccatctcaaagtcgaagaagatccgcaccttaatcgacacgccgaagaatgcgggcgtatttcacttcctgctgcaagtggagggcgactgtgacttcgagcggatacggatggcctatgcccagcatctgactgacctgagggacaagaccgggatgctcaggttccccaagctgcgtcaaaaacttgtcacctgttgggggcattatgcgtgggtgaatgacagcagcggcttcaacatcaacaaccacgtcttactcagcacccacaagtatcgaggtcgtccggttagcgaatcaaatattcaggagtatgtcagcgagctggccacgaagtacatcccatccgatctcccccagtggcaggtgatcgtgatccccaactcggatagcacacagccctactacatactcattaagctgcaccacctgataattgccgaggaggaggatctgcatgtgagtgagatgctcctgcttcaggatccccataagaaaaccacaatgaccctaagcgatggattggattgggacagttcgagtccaaaactttcccgctttgtgcgaaagccggaacacataagcagactcatcaatcatataatccatcttatcatttgccgttggcaaaagttcatctacgaatttgaatctcttgaaacccccgatggttcaacgtccagtgatcaggttggaaacctaagccagttgatgtcgttggtcgtaattgtcctggtgaatgtaattttgggctatataaggagtcgaactatgcttaagaaactgaaaaggcgttcagtcagctaccgcaatgaaaccaagtacagccttctcacatcccttttgcctcacgtaattaccaaaatattcatcaactttttctcatacaactttccaatcacaatcactgaaatctacggagcgactgctgagtttcaagcggcctggggtcagaatgtccaggatgttctacttttccggccaccacaatcgaagacctgcctttccttaaatcttcatcgctttggggacaaatacagactggctgtgatggcggatacccacctggctcccgatcacacacaactcaatgagcacaaggagcataaattaagggaccattaccgcaaggaacgaatgaagtcttcagagaatgtgcaaaagtcctacaaacataattatacgacaaatcaaaatcagatacggcaggactattattgcgatcattcgtgggaggatcgtgagtctccttctaaccatgaagaccatgctcagtatttgttttccaaaaaatgtttcaatgttaattatcacccggcacaaaatgagaaggctgctgccgaaagattccagaataagtttccttcatgcagtaagtgttcctcctccaacgaatcccaatcgaaaccatccagaataaccgtgatcagtgcgaaaagcggagacgatctcagagcggctgttcggtcccaaatagaggtccaagaggccttgaatgcgtttacacttgaagtgaaggataagagggaggaagtaccatccgaagaagaacgcagtaccaagcccaaaaagagcaaacaaattacgtctcatacgcaagccgagaaagtggatcccactgccgaatgcgcccaattagataccctaggggttgacgatttagaactcgtggatctaagtggcagtcctagtgatgccgctattaccaatgtggatgtaagtgacagtcctggtgatgcagctattaccaaaatggatctaagagacagtcctactgatgcagatattaacaaagtaattgatccggttatcaggaacattcagcgcatgtatctgaacactctgaaagacgaaatgtccctcatggagtatctagttacggtcccggaattaattaaaaaagcttttaagcgtccactcgctgaaaaagagcaaaaaataacaagggagtgttga

SEQ ID NO: 42678 - protein, 683 aa, DROSOPHILA
MMLVPLLMLSFLCAHFGNELSNYVLSIKYPNLTISKSKKIRTLIDTPKNAGVFHFLLQVEGDCDFERIRMAYAQHLTDLRDKTGMLRFPKLRQKLVTCWGHYAWVNDSSGFNINNHVLLSTHKYRGRPVSESNIQEYVSELATKYIPSDLPQWQVIVIPNSDSTQPYYILIKLHHLIIAEEEDLHVSEMLLLQDPHKKTTMTLSDGLDWDSSSPKLSRFVRKPEHISRLINHIIHLIICRWQKFIYEFESLETPDGSTSSDQVGNLSQLMSLVVIVLVNVILGYIRSRTMLKKLKRRSVSYRNETKYSLLTSLLPHVITKIFINFFSYNFPITITEIYGATAEFQAAWGQNVQDVLLFRPPQSKTCLSLNLHRFGDKYRLAVMADTHLAPDHTQLNEHKEHKLRDHYRKERMKSSENVQKSYKHNYTTNQNQIRQDYYCDHSWEDRESPSNHEDHAQYLFSKKCFNVNYHPAQNEKAAAERFQNKFPSCSKCSSSNESQSKPSRITVISAKSGDDLRAAVRSQIEVQEALNAFTLEVKDKREEVPSEEERSTKPKKSKQITSHTQAEKVDPTAECAQLDTLGVDDLELVDLSGSPSDAAITNVDVSDSPGDAAITKMDLRDSPTDADINKVIDPVIRNIQRMYLNTLKDEMSLMEYLVTVPELIKKAFKRPLAEKEQKITREC

SEQ ID NO: 42679 - DNA, 7148 bp, DROSOPHILA
tcctcttcttgtgcaatgcagcatcttggtggctttggatctgttaaacctagttatatgaatatatccagcatacgctttttatacgacttttgtattatttctctagattaaactgttattttcgtaatcgaaagattaattttttttttggggtttgccaaattaatttaatcaaaagcattttctaattttgtacgatccgaatctttattgtttcttcaacgtgtaagctgtcttagtcctaaagttatatatggtatatatatatatagtaattatcaatgtgtgtattgttctacgcacttttaaaacacttttcaaaaaagttgttgagaaggaaatcaaactgggacctttaaatgtattgttataaggagaacgagtgtctctggccaataggtgcatgccttttaaaaatacacactataacagctcagtgtaccagcctgcattaaaaaactttcaattgttgtatctaaaaagtgcttgcggtgtggttggtggtgtaaataaattaaaaaactacatttctatcaagtgccgcatatttagcttataaacctatgtttcgttatcaaatataagggtgtttgtatgtgaagtttaggactacatataagcttttggctatatacaaaggaagatctctgggcactggatgagatttcactcagttcgcacaaaactgtggctgctcaatatcgcagaacaaggaataacaattttcaaaataaatggtataatagcgactcctgcagaatgtaaaacatgatatacggaagtttggcgcaccacttaaaaatatataattgtatggccaaccttcagtaagtattgaaatccctttcagagttgagatcttcctttaaaggattcagctactcgaaatccgtttaacgtaataacgagtgcttttaaatttacaaaatatatagtttcacataaagtccaaataggagcctctactctcgctttccgtccatttcttttcccagtttcaaaagctattgttggaaccggcgtaagaggagagcgaactattcgttgttgccgaggatgtcgatgatgaggagttgctattgggtccacttcccgctggcttgtccatgctggctatgatggatcccaataaatcaggtctcttcgacgtgccctttgccatcgagactcgacttcccgccgcggagcctgcgatgataatcttgtgggagggcaaattaatggttttgtaggtgggtttcaacgtggaaactggggctgatatgggcattgtgatagcactgcttttggtgctcggaggaggcggcggcggtggcggtgcagatgtccgtgatggtggtaatggcggcaagggtggcaaaaccactgacattctggtaagaggcgtcaaagagcctgggagtaccactttcacaatttgactgggtggcggaggagcgggtgcagctacaattggtactggtggatggagaaaagattttggtatgggcgcagtagccagagtggagtgagcactaataagtggtgacggagtattaggcaatgatgtaaaagcagcagctgggactggttctttgggtatcggtatatccatttcgacaatctcctcggaacacacttcagagacctcctcttcgtggtcaacgatcaattggggtgtgctctccacaattagctcgttacccacatcttcaaccggatccggaggtggcggcggtggtggggctgttgttgacacaactggattggaggtactgatatcacttttactgtcggagacaatctttacttcgatcttgatctcgggctccttttgatttagacgatcaatgaaaggcgtctgaggcacgagtggcggtggcagtcctgacaggataggcggcgcagctacaggaagagtgcacgtaggtggcgcagaggagggtgtagatttcagtggaagtgcagttgcaggagctgtgtcattatttaatttgggaattttggcgggcgagggctcactcaaagagctctttgctggcgttgcatgttttttaggagtatcgtttttcttttctttttccttttccttttccttgcctcgttccttttccttatctctatccttccccctagacttttccttgtccttatcctttttgagcttctccttctcaggggtttcagttaccgctgctttggtcagcttatatttgtgctccagaaccattttccgcatatctatcttggagtcctccttgctgctcttctttttgggtgtgctaaccccactagctccgctctgactgctgctgttgctgttgttttcctgattttggctaggcgaggaacttcctgcagctgggtgctcgtctatgctgctctcactagatcgacgctccttgccatcgaggtcaataagtttcttcttggtcctgccatcgtgtgcacgctttgatggtgtctttttgccgcattcgtcgtggctaattgggtttggcaggatcgtttgcttttccttgtagtgaggtgtttcggctagcacagggttattcttctcgttaatcacttcctggccgggataatactgtcttagtcgcaggtgccaagctgcagagtaaaaatttgtaggttaatcgaacgatgaagagaaaaattgcattcgatcccttacctacgctcgttaccgctgtcactgtgcgaaactggtggattatgttgcggggtaagaagtatatgtcattgtcgcacagctgaatacgagcgtaacggacgccctcgcggcgcagctggttaagtttggcgtcctcgatccactgtacgcactgtgagattggcggctcgtgcaggtccagctgcagcatttccaccattgtgttaaagtcctgggcggcaaaagcgaccacgtctttggtgatgcggttctgcgagtaagtttgaccacagtgtacagctttcagtatgcctgcaggacggataatagaaacattacgccgattagtcgatttcggagcagcttttcaatgagaggcatctcaccaactgctgcggtggtgatgcgttcgtggccatggcccacgtgatccgcatgcgccttggtccgatcctcgatcatcgtctcccgtgcctcagacaaacgcggcaaatattgaaggttcctcaattcattaatacgagtcctgcatgtgaattgtgtaagttaattaatggtttttaagaatattgctccaaatgctacttacctttgccttttcagtggggtcttgctattcaactctgctgtggggaccaactgctccccagcacggatccagagaatggggccatcgttcgactgacgaggatccgtttggagtatagaattacaagcccaaggcatggtctgagataagagagttaaattagtcaagtgtttttagcatttgagtgtgcttacctttcgtaaaaatggattcatttcaatacgacccaacagatctgggaagtatccgcccacctcttcatgcactttgccaaccaaactgatctgatgcagtggtccatatcgaaaggttccttggcaatagttgcgaaccacctaaaggtgagaaacgaacaagaattgttacatatttttcttgctagcactgctttatatatggatttacctgctcgttgtattgcgacattgtacaggtctcgatatcggagtttcgtccaagaactcccgcctttaccgtcagcgttgagtagttctcggccatgtgctcgagtagatcgggtaaatacctcgcggcatcgtggacaatacccatcacatggtgggcatacccttgctcatcctcggcaaagcacacctcaaagaactcatccaccagctcctccatttcatctggcgacaatgcgtcgatttcatgttgatacaggtgaacaatggaggccccgccatttggatattgctccacctgaaagtagcagccgtactttaagttctccaagccagccggtggttttcggttaggcctaggcggcaggctctgaacggtttgccagggtccagttgctggtgcatgctgtaagcactggacgcccacgctggttcgccgaattttggagcgcttgtagcacttggagcactcccgagatgtagatgaggagtggcgagacgatgacgaagaggaactcttgtgatggttgctggaggatgaagaggacgaagacgataagtaggatttgcggctgctgctactttggctggaggaatgattgctggccgtggagttcgatcccgaactggatttcggtgccggcgaaggcattaacttggaattggagaccttgtctccgaaatttagctgtctggaaacctcatctcgggttttcgctatcgcctcgccatttactagaggtttgtttggcttctccgtcgattccgttttgatttccgcttcagttttaatgaggttactaagtactggtgtaggttctgtatccacttcttgtttggtttctactggttcttttttgatgacctcctccaccttaatctgcttttcgagagcagcaacaaccgcctgaggcaaaacaggatctgcccctggatccttcgacttgaaggagctgttctgactgctccggctgctgtcggaacttctccttcgattcgagtgcgaggatgagctggacgacgaggaaggaatctggaaaatataaatttgtagtgcttcattatttctactttgatggacagctgtgcaatcttgtagaggtttacttagcactatgtaaactggaaagtatactataaacatgtagcgcatcaaaaataaaaggttctgagaattatgactcgctgtatttaagatcacgtgtcttgcttattcgtagtaaatgggtggtaagaccctgacaatacttttgtttgttagttttactagaaattgacatttacttattaaagaaatgtatgttctggaaatcagatcagagtttacaataaatcaacgtttctgtatgcgttctgcactttcgaaacggttcctgggctcaccttctcccgatcgcgctccttctcccgttcgcggtccctatcactgcgatgatacttctccttgctgcgcgatgagctggacttgtgttcggcctccttggaggatttggagctgctctcgcgattcctgtcgcgctcccgctccctatcgcgctccttgtcccgctctttgtcccgatccctatccttgtcccgatccttgctgctgctgttgtggttgttgctgcgccgattcttgtcttcatcccgctccctgtctctcttcttccttttgtggttgcgctcttctgtgggcggcgttggcgagtgggtgggtgtgcaaatcacattagttgacattggattcgtgttctgcgaatttcgctttactttacctgtcttctcgtccgtacttgtgcttgtttttgttgtgtctgccaacgcggttgttgttgcagttgttgttgcggctgtgggtgcccctgcagttgttgccaccgacgatgctactgcctgttcctcttcagctgcagctagcattatacgtgcatttgttgttgggttatttgcgttgccatcgcctgactgcagttgttgttgctgttgtgtgggtaaagtgttgccgtttgtagttgttgctgctgctgttggttccactggcgtaattgttgttgttgcttctcgctgtgcgcttgtagttgttggactggcatttccgcgggcatttgcgttgttgttttccactgccgacgctttgtttacgcccttttcaggcgtctcccgctgcttggaagccccgaccgctccttccagtggcttcttctccggttttcgtacatttcccgtggattccttgccgccgttggccaattctacattattttcgccacctcgagtgttctccatgtgtttgtgtgtgcagtggcacacacacgcgcgtatgggtgtgtgtgcgtgttgccctacgcctgtattgaatatcgatcagtcggccgtctacgtgacgcctctcagctagccgtgtcttttatcttacgctccgtttgcaattcacccgcgccctcttccactcgattttcattcgactggcagaatttccgcagcggcgttttcagcgattcgcgaatagtttttttttttgttctagaagccgtctcgcactgtcgtttttcaactctagtcttcagatgtggagcgtttgtgcacactagtcaataaacagtgttctgttaggcgccatctagcggcaacccgcgcagatagacttgtgaatgaaagaatagatggatatatcgtaacatcgattgtaacgtgtaagtgcgccatctataggcgagtcatatttggcgcgttatttaaaagtgcacattttgtaatttgttactgcctttttaaagatcaaaatatataaacattgaataaatacaatttaaatgtgctttcaacactcccttgttattttttgctctttttcagcgagtggacgcttaaaagcttttttaattaattccgggaccgtaactagatactccatgagggacatttcgtctttcagagtgttcagatacatgcgctgaatgttcctgataaccggatcaattactttgttaatatctgcatcagtaggactgtctcttagatccattttggtaatagctgcatcaccaggactgtcacttacatccacattggtaatagcggcatcactaggactgccacttagatccacgagttctaaatcgtcaacccctagggtatctaattgggcgcattcggcagtgggatccactttctcggcttgcgtatgagacgtaatttgtttgctctttttgggcttggtactgcgttcttcttcggatggtacttcctccctcttatccttcacttcaagtgtaaacgcattcaaggcctcttggacctctatttgggaccgaacagccgctctgagatcgtctccgcttttcgcactgatcacggttattctggatggtttcgattgggattcgttggaggaggaacacttactgcatgaaggaaacttattctggaatctttcggcagcagcctggcaatgagccttagctgcattaagtaaatcagagtctttcttttgcttctggtggtggtttaaacgatgtggggttatgttattataacc

SEQ ID NO: 42680 - DNA, 4405 bp, DROSOPHILA
cgagacggcttctagaacaaaaaaaaaaactattcgcgaatcgctgaaaacgccgctgcggaaattctgccagtcgaatgaaaatcgagtggaagagggcgcgggtgaattgcaaacggagcgcgtagggcaacacgcacacacacccatacgcgcgtgtgtgtgccactgcacacacaaacacatggagaacactcgaggtggcgaaaataatgtagaattggccaacggcggcaaggaatccacgggaaatgtacgaaaaccggagaagaagccactggaaggagcggtcggggcttccaagcagcgggagacgcctgaaaagggcgtaaacaaagcgtcggcagtggaaaacaacaacgcaaatgcccgcggaaatgccagtccaacaactacaagcgcacagcgagaagcaacaacaacaattacgccagtggaaccaacagcagcagcaacaactacaaacggcaacactttacccacacaacagcaacaacaactgcagtcaggcgatggcaacgcaaataacccaacaacaaatgcacgtataatgctagctgcagctgaagaggaacaggcagtagcatcgtcggtggcaacaactgcaggggcacccacagccgcaacaacaactgcaacaacaaccgcgttggcagacacaacaaaaacaagcacaagtacggacgagaagacaggtaaagtaaagcgaaattcgcagaacacgaatccaatgtcaactaatgtgatttgcacacccacccactcgccaacgccgcccacagaagagcgcaaccacaaaaggaagaagagagacagggagcgggatgaagacaagaatcggcgcagcaacaaccacaacagcagcagcaaggatcgggacaaggatagggatcgggacaaagagcgggacaaggagcgcgatagggagcgggagcgcgacaggaatcgcgagagcagctccaaatcctccaaggaggccgaacacaagtccagctcatcgcgcagcaaggagaagtatcatcgcagtgatagggaccgcgaacgggagaaggagcgcgatcgggagaagattccttcctcgtcgtccagctcatcctcgcactcgaatcgaaggagaagttccgacagcagccggagcagtcagaacagctccttcaagtcgaaggatccaggggcagatcctgttttgcctcaggcggttgttgctgctctcgaaaagcagattaaggtggaggaggtcatcaaaaaagaaccagtagaaaccaaacaagaagtggatacagaacctacaccagtacttagtaacctcattaaaactgaagcggaaatcaaaacggaatcgacggagaagccaaacaaacctctagtaaatggcgaggcgatagcgaaaacccgagatgaggtttccagacagctaaatttcggagacaaggtctccaattccaagttaatgccttcgccggcaccgaaatccagttcgggatcgaactccacggccagcaatcattcctccagccaaagtagcagcagccgcaaatcctacttatcgtcttcgtcctcttcatcctccagcaaccatcacaagagttcctcttcgtcatcgtctcgccactcctcatctacatctcgggagtgctccaagtgctacaagcgctccaaaattcggcgaaccagcgtgggcgtccagtgcttacagcatgcaccagcaactggaccctggcaaaccgttcagagcctgccgcctaggcctaaccgaaaaccaccggctggcttggagaacttaaagtacggctgctactttcaggtggagcaatatccaaatggcggggcctccattgttcacctgtatcaacatgaaatcgacgcattgtcgccagatgaaatggaggagctggtggatgagttctttgaggtgtgctttgccgaggatgagcaagggtatgcccaccatgtgatgggtattgtccacgatgccgcgaggtatttacccgatctactcgagcacatggccgagaactactcaacgctgacggtaaaggcgggagttcttggacgaaactccgatatcgagacctgtacaatgtcgcaatacaacgagcaggtggttcgcaactattgccaaggaacctttcgatatggaccactgcatcagatcagtttggttggcaaagtgcatgaagaggtgggcggatacttcccagatctgttgggtcgtattgaaatgaatccatttttacgaaagaccatgccttgggcttgtaattctatactccaaacggatcctcgtcagtcgaacgatggccccattctctggatccgtgctggggagcagttggtccccacagcagagttgaatagcaagaccccactgaaaaggcaaaggactcgtattaatgaattgaggaaccttcaatatttgccgcgtttgtctgaggcacgggagacgatgatcgaggatcggaccaaggcgcatgcggatcacgtgggccatggccacgaacgcatcaccaccgcagcagttggcatactgaaagctgtacactgtggtcaaacttactcgcagaaccgcatcaccaaagacgtggtcgcttttgccgcccaggactttaacacaatggtggaaatgctgcagctggacctgcacgagccgccaatctcacagtgcgtacagtggatcgaggacgccaaacttaaccagctgcgccgcgagggcgtccgttacgctcgtattcagctgtgcgacaatgacatatacttcttaccccgcaacataatccaccagtttcgcacagtgacagcggtaacgagcgtagcttggcacctgcgactaagacagtattatcccggccaggaagtgattaacgagaagaataaccctgtgctagccgaaacacctcactacaaggaaaagcaaacgatcctgccaaacccaattagccacgacgaatgcggcaaaaagacaccatcaaagcgtgcacacgatggcaggaccaagaagaaacttattgacctcgatggcaaggagcgtcgatctagtgagagcagcatagacgagcacccagctgcaggaagttcctcgcctagccaaaatcaggaaaacaacagcaacagcagcagtcagagcggagctagtggggttagcacacccaaaaagaagagcagcaaggaggactccaagatagatatgcggaaaatggttctggagcacaaatataagctgaccaaagcagcggtaactgaaacccctgagaaggagaagctcaaaaaggataaggacaaggaaaagtctagggggaaggatagagataaggaaaaggaacgaggcaaggaaaaggaaaaggaaaaagaaaagaaaaacgatactcctaaaaaacatgcaacgccagcaaagagctctttgagtgagccctcgcccgccaaaattcccaaattaaataatgacacagctcctgcaactgcacttccactgaaatctacaccctcctctgcgccacctacgtgcactcttcctgtagctgcgccgcctatcctgtcaggactgccaccgccactcgtgcctcagacgcctttcattgatcgtctaaatcaaaaggagcccgagatcaagatcgaagtaaagattgtctccgacagtaaaagtgatatcagtacctccaatccagttgtgtcaacaacagccccaccaccgccgccacctccggatccggttgaagatgtgggtaacgagctaattgtggagagcacaccccaattgatcgttgaccacgaagaggaggtctctgaagtgtgttccgaggagattgtcgaaatggatataccgatacccaaagaaccagtcccagctgctgcttttacatcattgcctaatactccgtcaccacttattagtgctcactccactctggctactgcgcccataccaaaatcttttctccatccaccagtaccaattgtagctgcacccgctcctccgccacccagtcaaattgtgaaagtggtactcccaggctctttgacgcctcttaccagaatgtcagtggttttgccacccttgccgccattaccaccatcacggacatctgcaccgccaccgccgccgcctcctccgagcaccaaaagcagtgctatcacaatgcccatatcagccccagtttccacgttgaaacccacctacaaaaccattaatttgccctcccacaagattatcatcgcaggctccgcggcgggaagtcgagtctcgatggcaaagggcacgtcgaagagacctgatttattgggatccatcatagccagcatggacaagccagcgggaagtggacccaatagcaactcctcatcatcgacatcctcggcaacaacgaatagttcgctctcctcttacgccggttccaacaatagcttttga

SEQ ID NO: 42681 - protein, 1406 aa, DROSOPHILA
MENTRGGENNVELANGGKESTGNVRKPEKKPLEGAVGASKQRETPEKGVNKASAVENNNANARGNASPTTTSAQREATTTITPVEPTAAATTTNGNTLPTQQQQQLQSGDGNANNPTTNARIMLAAAEEEQAVASSVATTAGAPTAATTTATTTALADTTKTSTSTDEKTGKVKRNSQNTNPMSTNVICTPTHSPTPPTEERNHKRKKRDRERDEDKNRRSNNHNSSSKDRDKDRDRDKERDKERDRERERDRNRESSSKSSKEAEHKSSSSRSKEKYHRSDRDREREKERDREKIPSSSSSSSSHSNRRRSSDSSRSSQNSSFKSKDPGADPVLPQAVVAALEKQIKVEEVIKKEPVETKQEVDTEPTPVLSNLIKTEAEIKTESTEKPNKPLVNGEAIAKTRDEVSRQLNFGDKVSNSKLMPSPAPKSSSGSNSTASNHSSSQSSSSRKSYLSSSSSSSSSNHHKSSSSSSSRHSSSTSRECSKCYKRSKIRRTSVGVQCLQHAPATGPWQTVQSLPPRPNRKPPAGLENLKYGCYFQVEQYPNGGASIVHLYQHEIDALSPDEMEELVDEFFEVCFAEDEQGYAHHVMGIVHDAARYLPDLLEHMAENYSTLTVKAGVLGRNSDIETCTMSQYNEQVVRNYCQGTFRYGPLHQISLVGKVHEEVGGYFPDLLGRIEMNPFLRKTMPWACNSILQTDPRQSNDGPILWIRAGEQLVPTAELNSKTPLKRQRTRINELRNLQYLPRLSEARETMIEDRTKAHADHVGHGHERITTAAVGILKAVHCGQTYSQNRITKDVVAFAAQDFNTMVEMLQLDLHEPPISQCVQWIEDAKLNQLRREGVRYARIQLCDNDIYFLPRNIIHQFRTVTAVTSVAWHLRLRQYYPGQEVINEKNNPVLAETPHYKEKQTILPNPISHDECGKKTPSKRAHDGRTKKKLIDLDGKERRSSESSIDEHPAAGSSSPSQNQENNSNSSSQSGASGVSTPKKKSSKEDSKIDMRKMVLEHKYKLTKAAVTETPEKEKLKKDKDKEKSRGKDRDKEKERGKEKEKEKEKKNDTPKKHATPAKSSLSEPSPAKIPKLNNDTAPATALPLKSTPSSAPPTCTLPVAAPPILSGLPPPLVPQTPFIDRLNQKEPEIKIEVKIVSDSKSDISTSNPVVSTTAPPPPPPPDPVEDVGNELIVESTPQLIVDHEEEVSEVCSEEIVEMDIPIPKEPVPAAAFTSLPNTPSPLISAHSTLATAPIPKSFLHPPVPIVAAPAPPPPSQIVKVVLPGSLTPLTRMSVVLPPLPPLPPSRTSAPPPPPPPPSTKSSAITMPISAPVSTLKPTYKTINLPSHKIIIAGSAAGSRVSMAKGTSKRPDLLGSIIASMDKPAGSGPNSNSSSSTSSATTNSSLSSYAGSNNSF

SEQ ID NO: 42682 - DNA, 18396 bp, DROSOPHILA
taaccacggatgagcccaagcaaatcgagcttcgatagtcgataatggtagaccataaaaaacttgtgtagggtttattaacccccggctcactccagtcactctggcaatataccccgccttttgttaactccattcataagttttctgctcactttgctcttgttctgtttatgtcggcgaatgcgtttccggtcggcgacacaggaaaacacgtttatagcgaaaatattgtttttcttttcgaccttatcgtacaccatcgtacatatatgtagcagagagcccttaaatcatcgctgcctatgatcaaccaataaaaaaaaatataagactgcactttactcaagcaaaaagggaacgaagtcggttctcatttgtgttccactttattaacacctctttgttttttcgatttatattcgtcgattcaattgttatagctgttgtttgcacttttttaatgcgaaagtttttgcaacgggcttaaaaaagtattttctttcacttgtggacattatgtggtgattggtggcaaatacaaagctcatcaaaagtattttttttttttttttgtttagtggaaacttcaaatttttgtttaggttcgtttatttgcacttcgaattcatttgatattgaaaaaaaaagaaactgaaacgcactggtaagctgtcccattaaatgaagtctagacatctttaggagcgaagaaacgtagattggttttttgttgctaataaataaaaataaacgtacaagatcagcgaacttcatttttatagaacttttaatatttcaatgcgctaaaaacatatgtataatagtatatagtagatacagttcgcatttattgccttcaacgaaaccccaaaagcattaaaaactcattttctttgttttatttataccaataattgtggcttttgtttaatgtgtctcagtatcgttcttttattataagtatatacagttttactaatttacactacgcttagggcgctacaattacgcgagcttacatacttacaacttgtgcataaagtacagcaatacatggatctctagtttaggaaataattacacacgtagaaaattatggtacatacgaagtaaaataaattaaatttataaacgacaggaacaaattggtaacttaagacgataaaaacaataacagctaattcaatgattgctcgtgtacatttggcttgggtgtttgggctcgctcgattgggaaatgaagaggattggttaaggttaaggatcggattggattgcgtgggggggggggggtcagcagacttgggttgatatgttcttgggggtcctgccacaggaccttgaaggggtaccgctagttttttcgaactcaaatcgatcaaaaaagcaatgatataatcgtaatctaccggatagaagtggacctagctgccaggatgtgtgcttctataatttagtgggtgtttcggatctgccagttgccacgtgccacttgctatctgctatctgccacctgccatctgccatctctcggttatatgttagtggtcgggtatgcatgtatgtatgtatgtatgtatatgtattcattgtattcattgatgtcgccctgctatatatcttccaatttacatcctataagctctgattgcataagttgtatgtaattaaattaacgtatcttcgaatggtttttggattatcttctccacaaaattgcacaacgtctggggcagcgggttgggtgtgtttcactttttttttgttcgcgtcgaattgtttgcatctttatttctttttattttttttgcagtgttttcaatcaaatttttgtttttgggggcccatgccaaaggggaaccgctgctgattatcagctggttatatttgtttgtcgtttgcttgctatttggtataagcggcgttaatcaaaataccgaataatcacattgtaaattattgtccgaaagtgtaattatacctttcaagcccgggcctcgaaatctgcatctgaatcggaatcggaatcgaaatcgaaatgggtttcgaaactgggagtgactacggccgcaggagcgtaagcttctgctgctcccggaaggcgatcagcgagcggaaggcggagatgggcgaggcaattggggccgcacccagttccggatccggagatgccgccgatggatgtcatggctttgcactcagcgaggtcacattcacgccgggcgatatcttgccggagtgcgaactggatgacgaggcggtggagttgctggatattggtcccatcatgtgctgcgcagccgattgtccactgctcgtgggtatgtgcaccacatcgcagcccatcgacgaggacgaactggaggcggagggcgaggcaactggcggcggtgccacctgctgtcctccactcgatccacccgaggtggtcagactgagcggtgcaaagtggtgtccattggcggctccggatacggccgccttccacagcaacggattcatgcccagcggtccattgtgggccgccaagctggcaccgaatgtgcgctgatgctcgaggaattcctgcgtgggagcacccagatgcgctgcagctggtccgtagaagccacgatataaatccgggcggacgtagggtgaatagttgggaattcttgctgcgaggggcgatagaatcttgccgggtgagggctgttggccggggtgtccatagaagccgggatgcgcaggcggtagctctgggtggttatccttggcgccggagctggaatccttgctatccttggaggccatgtcggccagcgaccagatccttggcttcgcggtgccccccactgcggtctgcagcgagttctgctgcgcctgctggtgctgctgcagcagctgctgttggtggtgatggtaggcggcgatgtctggcggggaacccgccggtggccggaagtggtgatgcagggcggcgggatggaagagtgggtgggcgcccggcggcatgctgccgggtcggtcgtataggtccggtgatccattgggcgatccgggccgggactcggaccactcgctgttgttgctttcgccgggacggtcggtcatcatgtcgccaaggcgaccggaacggtccttgtcgtccgtggaaccaacgccggagtccttggcgtctgtaaagattaacaagaaggtacggggtaaattaaaatcaaatcaagataggaaaatggtaaaatctgaaagccttagataaaaacagaaaaggtagccgaaatggaatgctatctggtaacttgcttacaaaaatgttgcctactttcaagggcgattgcaatacaaatttcaactatatcaaaggtatttagttaaatgaatttaaaacagcttagtatgcttagttgttttaagatacgttgaattttgatgtagtagctaaactttatatatatgaaatactttgaatatgatccatctcttacctaacagatcgttatcctcggtgttcttatcatcgtcatcgtcgatattggcatcatcgtcgtcgacgcgattcctgggctcccaggtcatcttgttctcctttttcagtcttcttctcgcgttggcgaaccacgtggacacctgcgtcagcgtcatcttggtgataatggccagcattattttctcgcccttggtgggatacgggttcttcttgtgctcatttagccaggcctttaacgtggatgtggtctcgcgggtggcgttcttccttctggccccattcaaatccatgccatagctgcaatattaccaaaaaaatgcaagaaaaatgccaaattagactgggttcacaaaccgggtgcggacatcatttgcgcgataaggaaagaccaacagcccaacaaccattccccgaattgccagcaggtgattaaggccagaatggaatgcagccagcccagctgttgccaggtcgtttggagttctttaaatatgcgacggcccaaacaattgttgcaatttgttaaactgggcggccaacagcaaacggtgggcgggcggtgttggctttgttcagcgttaaatttgttcatcataaacgcatttgcatgggcccgaacatttatgcccgtgcagtttgcggtctgacacattgctcccccatcccactgtgccatccgatggagacgatggtcaatggtcggtggacggtggtcgatggtcgaatgttgaatgttgccgcatgcctctcgaacgacaactgtcctttatcgctttttgtgggcagttaacatgaacgtttttagtatattggtttgtatatgtatattgcgaccaagcgtgtatatatgccggaataaaacactacactgagagataaaataccaactaatttgaaacctaactaatttaaagatcgacaaccatgctttgaatagttttgtataatgaggaataccttacgatacttgtatttcattaagttctgcgctttcaattctcaagttgtttttcagaacttgttgagagagtcttttctaacttattaattggagaatgtgagctattcgggtaagaaaaaaccattctggacttaagaaaccgattttaacaatatagtttgtatctttttttcagtgttcggaatgcaaaacatcgacgggggagagaacttccaccatcgtcatcgtcatcgccatcgcatacatgtgtagctgtctcatttgtagttctcagacagctgcccgatccgatcccatccgatctgatccaaatggagaggaggatgacaacgatgtcaactggatgctatatactatgtgcatatgtgcatttgtgtagggaagcgacgacgctgcgtccgttgcattaattaatttaagtttgaatgcaaagtgtcgccgagtgcgaaacacctgcgcagacaggcagagtgcctttgatcacctgacagctggatacatttttttaattttcctatcagcgcgctgtaaatgattggtgacgacaacaacgcccccccaaaagttcgtaatgctgctgctgcggcgaaaaatttaaaaaaaaaaggtggggcctacacaatgatggtgtatgtataccttatgaattttgaatcgaacaattcgccaactagcggcacgtcacggcgaaataactcaaaattgatttatggcaaatatgtatgcttgatagacaagaaaacaacgcaacaaggcatcgatatcaacagtagctgcatgagtcaactatcaaattttgttatgagtgtcaattacaggggaaacaatgggcccatcgttgtacctgtccgaacgtgaggtgacgtgacgggatgttgtcgattctcgacgattgtttaaccggcaattgtgtgttggaaatttatgtcactttggccaatgcaatgggcttgttgtggttttctcattttcatttcttgtttttttttttgtttcttttcatttcatttttgaggtgcgcaatcggcggaagcagcccgccgacgtgcaaacgatcaattacaagcgaataaattgaatattcgaaatccgaatgccactgcgcctgcgtgccaatatgccggacttttactattcgaacgcacttttccgaaacggcatttaaatgcacctgcacgcacctgcagcacctcaatcccaatcccaatcccaattccaatccaatcccaatcccactcacgttccgatcgacgcctttccagcggaccaccatcggggttttgtcgatttggattgggattgggattgggaatggggggaactatctgtcgaactcgcactttcagcgcaactatgtatgtacatatgtatgactaatcctcacctgttgaacggatagccggcgaaggccgcgtcgtatggatgatacatggatggatatggccagggcgatgctccggccaccaggttctccttcagatcgatgccagcctgttgaaaagaaaaaaaaccccaaaagataacactctgattagttgtttggttatttataattttagactaatttctagacgaatttctgattttagcttgatctttggggagcaatgggccagaccttgaaccaaaattattcaataacatgttaaacatatcattaagacagcagcgagtatatatttttgttgaggcgatagatgatggcttgttttgtgtctgcgttatcaaagctcagcaaatatgattattcatcatattcacagcgagcgctttattgtttaaatttggatggatgagggtgaaagaaatgccttttgggtttctagtaacttttgaagtaaatatatatataaatatgtgattgcatcgttagtttttccccttaaaagctgtgtgaattccatcagtgatttcttcacaagaacgcatttcggtgtcactgtgcaacagaatgtggtgataagcccgcggcaatctgaccagcatcgaggcgagcatgtggccatttcgtgactctggcagtgactttagaagcaaatggccagcggtttgcattgcgttcggagttgccacacagagagattggctgcttaatctgcaactccatgtgcatgtacatcgcgccattagacactcgattgtaatcgttgaaaacatttaggaacacagactttggcactgataataggcgtggggggacacgacgtgtaatatagagcactgattaagtttaacacgacaattatctacgccgcttgtctcaactcgctgcgacattcgccagctgttccagcgataatgctggagtgccttctatacatcaatagtatatatagtatatatggtatatatagtgttcaagttgaaatcggacgcatattcgtcactgcgacgcgatgatgctgcataatgccgctgtcgttgccgcagttatgacaggcgcgttgcaaatagtcgccagtccggaaaacagcgggggtacgaaaacaagatgcgaaatcaatgagaaccactacgatacggatctacatggcaccgcaggaccaatgagtgcaggacactcggatgcaggtcccagaatctattgtctccgtgtcgcgacattcgtctggccagtttgccgctgcaaaagcggaaatatttttatgtcgccaacacgaaaatgttgctgttgcaacatcgctatcgccgacccatcgacttgccgctggagcaggagtgggagtagaagtggaagtcttgggtctgggatctggccaaaaggtttcgggaccggcactggtggcccagcatgtggtaagtgcgagtacagcggcgatagactgataaacaacgaaagcaacagccacagatcttgaggaacaggccaaactgcagggccaaggccctttgacaggtacgacactcgaaaaaatactagcatctatttaaaaatatcgtagatctcataaaaatgaatttatacaagttaaaggtaacacgagtttgtaactaggacaacatttaagaattaatgcaaatttataatttcatataatatttatcttgttagcttttttatgcattttctggattattttaaacagatctcaaacacggtaaatatatttaaaaaaaacacgaaaactagaagttttatttgctagtttattttcggtagtacttttctctgagtggaggacggcctctgactccttgccgatagcagaaggcagttagcccaaacatggacagcgttttcgggacagactatattaaattacacggcctgctcctatttctcaatggaagctcgatgcgagaccgggctggaaacctgtttacgttttacaacctttacaacaatcacgcccggctatcacgggaattggccaaaagtcgctgcatgcgaatgggaatgaggatgcggatgaggatgaggttggggtcccgaattcgaatccgaatctgtgtcgtgcgtgtttggcagcgagtgcgtgtaggccatgtcgatgcgggcaaagcgcatataataaattgctgccggctaccagcaaagtagccaagtggccaagtagccaaagtatctccatggagcaacagtagctggttgccattgcagttggcagttagcagctcgatactctggtggaaaagcgcacccgtggcgggatttttgcgctggcggtggttaatattaacaacattcgacatgtttgcgtccgcgtttattattaccaatactgcgatgcgacagcagcaactgttgcagcagccacatttgcaacagcagcagcagcagcaacatctgcagcagcgtcaacatccacagttccaccgcacagatgcaactcgttttcgagttaaatattgcattaccactggcgacgacaactgcaattgtaaaagccttgttgcccagatcgcatattgccgatacagcgtgttcttccgcaacgatgtttatgcatttgcaaaatgttttaaatgtttgtacttttggcactagagcttgtttccacgctcggtaaatggtgtatttgggcagtaagtgaccaccatcaacgaagtggtaaggattttaacccatagatctctagatttctgaaaatatttgtgccatttaaacaactgacatacatagttgtggtcacaaatatttaagcacttttgaatcattgccgaatcagatcgtaaatatatttatgtttgctgtatccaaaagtgagctgaagctaataggatgtgtataataaatcgaaatccgatacttcacaaacactcgtaatcacctcttatatggggccagttaacatttcccattaatcattgccgtgaagtcaaagtaaatatttgctgagtgaaactgtgggcaaaagtccaaatatgagtgaaacaagctcgagaaacgcatcacagccccgcccctacaccgccacgccccgtcggttgaacatgaatgagtgaccactgttggccacaaagacctcaagtggttagacgtctgatccgctggatcttaacaagcggagtgcgtcgtttcacgcatcgggaagtgcggtttgccggctaccagaacccgggattccatggataccaccaacatctcctcctgtctgcgagcaaattaaataattcaaattaaaatgggactttgtcttcattacgaggcaaattctgcgactgtgttcccttcacgccaaatgggacgtcaatgggcgcactgccatgggggattatacactccgcttccggatgatggtggcaagggattctggaggggatcggttggatcctccggctcctgtggtctgtcgccctgatgcgccacgatttgagcgatgcgcgtaatgacgggccgagttaattaattgctgcttcgatttaaaaataaacgcacgtttgcccgccgcattcccgcctgtacagccaagaatgaatggaatcgaaatcgaaatcggattcggaataggtattggtattggtattggaatcagattcgtatgcgtattcgctttccgatttggagtcggaatcgaaattgtaattgaaattgacgacagcgcggagtttgagtcgcgccaaggaatgcgttcgtttctaggagaactaatctgcactgagcataaactttaaatctaaaaaatcttttcaaatattatatatcttaataatgatttaaaatttcaatgaagaagtgatagatttctttgtaattgctgtacagaaactaaatggaacttatttggccactgatgctttcatttggttggtgaacattgaaaatttcttcctgtgtaccctttgcttttttcccccttttcaagaactggagctcccaactcccgatgacactttttttcacaactcgcttataaagttgtaccactgaggttgctgtcgttgttggtgttgatattgtgttgctgttgttgctggtcgtgttgcctgtttgtttgtccgttgttcgtatgcgttgccatgactgctaatttgtttgttgtgggcagggcggccattcacacacacacacacacacagcaatatcccacccaccaacacactcacacacacacacacataagtagcagtatcaaggcgcagggcttccttttcctttttgccagccgtataaaagtgcaaaatttactgttaacgaacattttcaactttgccaaaaagccaaacaacaacggcagcaacacaaaaactttccacaacacttacggcaacaacaatgagattggtgcgagcagtaaatgtatttagtactttggcacacacaaccttcaacacccaacagccaacaccccacttacacccccaacccagaacccactgtaaagtatagccccaaccacccgtcaccttgccattagaaaagccacccccgaaaacaacacgacaacacttcgacattttcaaaagttgacaaatcagtgcttgtagccaaggttccaaggagcaggatgtgccaggatctctaaggttcggagtcgggaggatgctgtatgtaactcggggttgttttctctataatgccacagagtgtgatatctggaatgggattcagttcagttcggttcggttcgtttcggtgccgaaataacgaaggagtgtggtccgatttgtagttgctttctgctacattttgtagaaaacttgccagggggcaaaagtttttgcagctcccacaggatatgagcgtataccgcacatttcgtccttttgttgaagaccaaaaacccagtgcgacgactatgttgtcgagtgtgaaatttcatgcttgcattgttgtcgttgatgatgttgcggcacttaaactggggaaaagtcaatataccattttggctgcttgcctgccgtcgactgggtctaaaaacacccatccgccccgttagccaaaggcctctgtgttcgcaatcgggttgaaggctctgggccttcgcacaaaggaaggaccttttatggcgtagggaagcttaagtgcaactgggtagtccactcattaggcttggaaagcgaatgcacttataatttgctggaaaaacatgtagtgcttagccccaacttaaactgctcgtcactttagacaaataatagtggctaattattggttccaatttgcgattattaatccagctagctagataaatctgttaagatttaaaatgctgtgtaattgttagcagttactaatcattgactcgcattttttatttttatatttaaaaaatgttctttcattattattagaattaaagaaacagctgaaagtacctttgggataaaatatacctataatatttctcactccccacgtgcccaagaactgaaacattcaattagttcaattaactccgcgtattctctgtctcaaaaataatttccaaaaaaagtacacatatagctgcccaacaaaggacccattttaaatgagggcagacattcggcaattaacgaaattaatttctccgagtgtcagcgagtgcaggatgcaacatatgcggccagggtcgaagtcaatttcggacttaaggataaacacataaacggatgaatggataaatggatgcatggatgcacggatgtacggatgtatggagggcggacaggatgacaggctgtcacttgcgtgttgacaaatttattaataaggtacgaagcggcatcgaccgtcgacgcccccaaaaaacactagatgaaaaacgcggcagcgggaaaatgggaaaacgcggaaaagcgacaaaggagggaaacgaacaccgggagtggctatgggttaggcctatttgttagcgggcggcgctcttcaaatgtatctttgccatttgaaatgacagctttgctgcaccataccatccaccgttgtcgtcatcgtcgtcatccaccttcgagaccggagtcacattcggagtcggagttttgggatatatattcccgcgatgcggcaaactgacagccgcttgacagttcgtgtcaaagtaatgaatccaccgcattgagcagacacttttacaactagcctggatctggatctgcatgtgcctagcatagatgtatctatatctatacgactgcggcggatccgaagagaaatcgcttcagtttagcgccggcggctgaagtgactaattacgaccccggatgatttatttagcagatgccgcgacccgacctgttttgccttttaaacggccgtgtaaatgccccatgatcccaagtgccccacatgccacatgacacttcaatcacatcctacttaattgctgtgtcagcagatggatatacatacatacatatattatttatatatatattcgatctcgatcgctgtagctgatcgatgctttgcgctgcgactttcataatttgtttgaacgaacaatggttaaatttatacagctactggccggcggaccggttctctaaatttatcacattattttagccctcaaagtaaaccagttcaaatgcaaattttgctttgaacatatatttaattgagcatgtgtttgattcggcaaattgaattgcacttaaatcacttaacggctataatatttaatcacacattagcgttcgcagagatcagcaaatatttttgccactgccatccgcggcaaagtgtttagtcacagattcgattcactcattcgtctttgcggcttttattcgaacttcaacttcatccaaagtagtgggcattctaaatactcaactggccattcattaaactctcagtttcaatttcacagtcgtcagctcgttttgggttctgctgcttttgcttctgttttttatttcattttattttttttttttttgcccggagtgccgtcagcttttgaggcttttttctttttggcttgtaagcaaataaatttatgtgttcacttttgaatgcgacattttatcggatcatatttaatgggcgctgttagggagtccaaagaaggaggcctcaacaaaagggacattaaacgccgaatgcccaccgattcggagacaaatttgaacattcaaattgaattgaatacctgtgtcggtttgcatgacattttttaggcagacagtttcaaatttatatcctaattaagtgttaaaactgaactgaattcattttgattttatataaactattcttgaagcacaatttcaacaataagcaatgcacattaaacattaatcaattgtaattgcatcccctccaaccattttcacagacaattaaaaatagcatttcgaaaacattttatgagacaaccaaaacaggaaaacaagtcaaaacattgtatttagctcaattgagcagacagtaaatgcattttctccgattccaactaacttttcagcagaatcgaaaacacatgcaccggatcccaaaactaaggaaaccaaaaacccaaccactgggtgtccagttcctcgggctccgcatgtggtccccgagaacattgtgtccaaatagaattgttggcaaacaaaggcaaattacacgatgctattagaagcgatgcgaacaaagggccgacggcgaagcgccggacatgtggcgatggtgaccaagacgtgccacacagtccttcgactgccacagtcttcccagtccattgtccataaatcggaaaagtgcagcacttcgggtatcccgatgcgatgccccgactcctccagcagatcgagttaagcgcaggcatatttcgcaacaataatgtgacttgaaatatcactgggcgagcgaaaggtcagttgtaggcttagggcctaagtaccacgggacctgtggccccacggctgacaaatcgcttcaagcgaggctccgctgtaggccacagtacaagttcggaagcatggacggggctcggtacacggtacacccatggtacacgatcaaatgacgacgcgactttagcttcaacttcaacatcaactttaactccaacttcgatggtggtctcccgctcctcgagtcgacaaattcacaaatttattgcgccattgttcggattatatgacttatgaacaggctttacgatgcacggcaaaaaaaaaaacacatttaggatcttcgaaacgaagttataaaacttcatgaaataagcataagaaatcttccacacagtttttgcacagaagatgctcagactgtttctgattttggctcagtgtaggacccatgtctctccaaaaaataccgaagcttattcacgaccgagttcacttaccggattggcgtagaacggcggctgatccgccgcaatcccggagaggtaggcggacatgccctccggatagacgccgagcgggactccgccggcggcggctagtcgctggtagttgagcatgtcgtactggcaggagcagatcgtctggccgctcaccggatccgtgtagatggtgcgacccgtatcacagcagcggttgggcgggttgcccgctccgggcgccggtgctccaccgggggcggaggagtgcggtcccggtggcggtgcgcccaccagcgagagggcgggcaggccggcggacggaccgcacggcgaggtggagcgagcgcccggcggcaccgtcgaggtcaccatgccactgtgtcctggcccggcgattcccggtgcactcagcggctgggcggcgggacaggcgagcgtgggcagcgtcgagggcggactctgcggagcgttggttggaggcgtgttgggcgacgaggtggcaaggtgagttgaaacggcattctgcaagttaagtggaagacaacaacgttgagtgcatttgcttaacggagctaacaagcgtttggtactaaaaatagctgtccaagttgattatgaacaatatgttgtacaataagtaaacaaatttgaaataaaataataaataaaatttataaatttaagtactgcactactaatcccttgatagcttataataaaatgttttaaggcctctttctaaaacgaaacttttttagaaaaatgttcttcatctttgaagttaatttcagtaaattgattatccgactttgatcttttccaattcgtttctcgagtttatggcggccattaaggcgctgcttcttgcgctggataaaaagccccaatagacggtctactgtaccgcgctaccagctggcactaaaacttaattaaaaacgtagccccttatcagtgcgataagagcgtctcttcagtgggatgggttgtgggctgtccacgggcccttcagaactgcagagcctcagaaccacaaaactgggatcccaaccgatggattcttccccccctacaaactgtgctctctcctctctccactcccgaaaacccctttcccctgcgatccggcgatcttcaaagtggggccgccattaccaacaaatcatgttttcgattgacaacattgatttaaattacacagccgattgctgccaacgacgacagcggcaacagcaacaacaacgacaagctgcaacaacgtcctaagagcaatttgattgtaagttgtccaatgactgcctggatcgatcctctatatggtatggtatggtatggtatagcatggtatatagtgtgtttgtgtgtgcacataagcctatcgcgcacttttgtcaacacttttagtcaactgaaacaactgcaagagcaacaactgcaacaacttcagtggacaagagcaacgtacacattcgcacacatgcgacatggggtaaggaaaacaagtttcaggtttgtttatcgctgcctccttggttaacttctccacttcttgaggcttggggctgtgggctttggggctccaggggctccggggcttcggggcttcggggcttggagccgctcttcccgtttaacattttacaaatgatccgaggcgtaagatacgatttttatcgcaggccggcggtcacagtgctgcatgttgtatcatcggtcgtgattgataccgccacaatgttgtcgctgatgttgctgttgcagttgggattcggttcggtgttgcgtctcgtgctttcatcaagtgacaactcaagtggccctatgcgattaaaaattaattcccggtgtttgccggatggctggatggatccacaatacactcgtacgatttcttatcaatgcggctctttgaatcaaccgccgatgattatcgactatctatggctacaggctataactataacacaacaaatatctcaactcgaagtggtcgttttgcggctaaagtaaattattttcgggtagccattatgatggcgagggtagagtgacagccattcatgtttgtttaaagagcatttaatatttccgatattccgtttcagctttcgactttgcgccacaagttgcttttacatacatatatgaaaatatatgaatatgctcgagtgtcgagtgcaagcgattaaatttttggaacagggataccatattaactggggatcgtgttaccactgagggattattatggctaaaatcctattggacactcaagtgtgactgagcacgatgtgcggtgaccttgccagcttggttaacaaccaaagagacattgatgcataagagagattttccgaattggcagacggtttttcgcgtgttgttcgcccaatgtagcacacttgtggtcctgacattttcaatctgttttatttttaaatccatgtcttccgtttgccaaatcaaaatgctaaggtattcgaacccagagtaatcccactgtttctgcttttatctacatgtgttgcactgatttgcctcgtagctgaacgggttttcaatctaattgccactatccaaatgccagacaagctaaaatgcagcgattaactgaaccatcttacaagtaataaaaaatgggggaaaaaaaacaaattgatatacgcaccattactaaacagataccggtttcattactgtgcactgtcatttaatattaatttttgcttttaactaaaactataaagcaaatcttagagttacgatgcaccgatggactcgcgcactgaaccgacgtatgtgtatttagatagatttataatccgagtgaagtgattgtgattgtgcgatctgtgatcttgtgattgatccgaactagtttttatgttgattttggatccggcttgcgagctatttcagtgtttactttctttgggctgtgtttatttttttttgttattcgtttcgttgcactgcgttgcacttgccgacggctgcaaggagctggccaactcgagttagctggccaacacaggcgctactgggcaccgtaaatccgtaaaatccgacgggcggctcgacgggaatcgtttatgtgagtcgtttaaatttgtagaattggtagaatcggtattcgggaggagcagctctatccggaggatgcgaaaacgaagcacgaatgaaccagaggcggcggcagcaaatagtagtatctgggtgtgaatctgattctgtttctgaatctgggtactgaatttgaatccagctcgcagaacgacggcgagcggcgggcagagagcactattattcacactgcggcactggcactgcggcggacacgaacgatacgaacaatctgcgtaacagtcaaaagtagactaacatgagtttcttgagcaactacaaagtgtacgacaaatgggaattacacgacaaccgacaatcgaaaaacagcgcagcgcaacaacaagaacaggcccacgcaccaccacatcgatacatagcccgcgccgcgtttgtatgtgtgagcgagagagcgcacaaacgggtttctccccttaatttttactcgcaccttcgctggtgtgcgtgcgctctctttgctctttttgagagcggccaagtatctgtgcgctggtgtgcgtgcgaaaagtatctgtgtgcgctggaaaaagtagcaaacgaggcggcacgacgacaacacgaacggcaacaacggcaataatgattatcattataagtgggctggcgctccggctgtgtgtggcactcaggggattgggattggaatcggcatcggaatcggtatgctacggtagatacccctcaaccccctaccgaaacgtagccaccaatctcgctgcaagtgcgagcgagacgcagcaaaccagttggttaggtggaggggtgggggcaacaaaaaaagtatctaccgcctgtgtgaccataaataaagtatctgccagctgcggccgggcgagagcgggatggctatagccgctgcgccgttggccacgaatcgcaaccaagcggcagcgacagcggtagtatcgcaacttgctcgcgttggctgtcgtcttgctggcgtgcgagcgagatggcatagcagcagcagcagcagcagcggcgacaagaagcagcagcagcagcagcaacaccgagagcggcagaacatgaaaaaattaacttaacaactagaaaaatggctgttattgcgtgttgttgtaaatgccgatgtatgtatttgtaggcgatgttgttgctgttgttgtcgg

SEQ ID NO: 42683 - DNA, 3677 bp, DROSOPHILA
ttctgcgagctggattcaaattcagtacccagattcagaaacagaatcagattcacacccagatactactatttgctgccgccgcctctggttcattcgtgcttcgttttcgcatcctccggatagagctgctcctcccgaataccgattctaccaattctacaaatttaaacgactcacataaacgattcccgtcgagccgcccgtcggattttacggatttacggtgcccagtagcgcctgtgttggccagctaactcgagttggccagctccttgcagccgtcggcaagtgcaacgcagtgcaacgaaacgaataacaaaaaaaaataaacacagcccaaagaaagtaaacactgaaatagctcgcaagccggatccaaaatcaacataaaaactagttcggatcaatcacaagatcacagatcgcacaatcacaatcacttcactcggattataaatctatctaaatacacatacgtcggttcagtgcgcgagtccatcggtgcatcgtaactctaagatttgctttatagttttagttaaaagcaaaaattaatattaaatgacagtgcacagtaatgaaaccggtatctgtttagtaatgaatgccgtttcaactcaccttgccacctcgtcgcccaacacgcctccaaccaacgctccgcagagtccgccctcgacgctgcccacgctcgcctgtcccgccgcccagccgctgagtgcaccgggaatcgccgggccaggacacagtggcatggtgacctcgacggtgccgccgggcgctcgctccacctcgccgtgcggtccgtccgccggcctgcccgccctctcgctggtgggcgcaccgccaccgggaccgcactcctccgcccccggtggagcaccggcgcccggagcgggcaacccgcccaaccgctgctgtgatacgggtcgcaccatctacacggatccggtgagcggccagacgatctgctcctgccagtacgacatgctcaactaccagcgactagccgccgccggcggagtcccgctcggcgtctatccggagggcatgtccgcctacctctccgggattgcggcggatcagccgccgttctacgccaatccggctggcatcgatctgaaggagaacctggtggccggagcatcgccctggccatatccatccatgtatcatccatacgacgcggccttcgccggctatccgttcaacagctatggcatggatttgaatggggccagaaggaagaacgccacccgcgagaccacatccacgttaaaggcctggctaaatgagcacaagaagaacccgtatcccaccaagggcgagaaaataatgctggccattatcaccaagatgacgctgacgcaggtgtccacgtggttcgccaacgcgagaagaagactgaaaaaggagaacaagatgacctgggagcccaggaatcgcgtcgacgacgatgatgccaatatcgacgatgacgatgataagaacaccgaggataacgatctgttagacgccaaggactccggcgttggttccacggacgacaaggaccgttccggtcgccttggcgacatgatgaccgaccgtcccggcgaaagcaacaacagcgagtggtccgagtcccggcccggatcgcccaatggatcaccggacctatacgaccgacccggcagcatgccgccgggcgcccacccactcttccatcccgccgccctgcatcaccacttccggccaccggcgggttccccgccagacatcgccgcctaccatcaccaccaacagcagctgctgcagcagcaccagcaggcgcagcagaactcgctgcagaccgcagtggggggcaccgcgaagccaaggatctggtcgctggccgacatggcctccaaggatagcaaggattccagctccggcgccaaggataaccacccagagctaccgcctgcgcatcccggcttctatggacaccccggccaacagccctcacccggcaagattctatcgcccctcgcagcaagaattcccaactattcaccctacgtccgcccggatttatatcgtggcttctacggaccagctgcagcgcatctgggtgctcccacgcaggaattcctcgagcatcagcgcacattcggtgccagcttggcggcccacaatggaccgctgggcatgaatccgttgctgtggaaggcggccgtatccggagccgccaatggacaccactttgcaccgctcagtctgaccacctcgggtggatcgagtggaggacagcaggtggcaccgccgccagttgcctcgccctccgcctccagttcgtcctcgtcgatgggctgcgatgtggtgcacatacccacgagcagtggacaatcggctgcgcagcacatgatgggaccaatatccagcaactccaccgcctcgtcatccagttcgcactccggcaagatatcgcccggcgtgaatgtgacctcgctgagtgcaaagccatgacatccatcggcggcatctccggatccggaactgggtgcggccccaattgcctcgcccatctccgccttccgctcgctgatcgccttccgggagcagcagaagcttacgctcctgcggccgtagtcactcccagtttcgaaacccatttcgatttcgattccgattccgattcagatgcagatttcgaggcccgggcttgaaaggtataattacactttcggacaataatttacaatgtgattattcggtattttgattaacgccgcttataccaaatagcaagcaaacgacaaacaaatataaccagctgataatcagcagcggttcccctttggcatgggcccccaaaaacaaaaatttgattgaaaacactgcaaaaaaaataaaaagaaataaagatgcaaacaattcgacgcgaacaaaaaaaaagtgaaacacacccaacccgctgccccagacgttgtgcaattttgtggagaagataatccaaaaaccattcgaagatacgttaatttaattacatacaacttatgcaatcagagcttataggatgtaaattggaagatatatagcagggcgacatcaatgaatacaatgaatacatatacatacatacatacatacatgcatacccgaccactaacatataaccgagagatggcagatggcaggtggcagatagcagatagcaagtggcacgtggcaactggcagatccgaaacacccactaaattatagaagcacacatcctggcagctaggtccacttctatccggtagattacgattatatcattgcttttttgatcgatttgagttcgaaaaaactagcggtaccccttcaaggtcctgtggcaggacccccaagaacatatcaacccaagtctgctgacccccccccccccacgcaatccaatccgatccttaaccttaaccaatcctcttcatttcccaatcgagcgagcccaaacacccaagccaaatgtacacgagcaatcattgaattagctgttattgtttttatcgtcttaagttaccaatttgttcctgtcgtttataaatttaatttattttacttcgtatgtaccataattttctacgtgtgtaattatttcctaaactagagatccatgtattgctgtactttatgcacaagttgtaagtatgtaagctcgcgtaattgtagcg

SEQ ID NO: 42684 - protein, 641 aa, DROSOPHILA
MTVHSNETGICLVMNAVSTHLATSSPNTPPTNAPQSPPSTLPTLACPAAQPLSAPGIAGPGHSGMVTSTVPPGARSTSPCGPSAGLPALSLVGAPPPGPHSSAPGGAPAPGAGNPPNRCCDTGRTIYTDPVSGQTICSCQYDMLNYQRLAAAGGVPLGVYPEGMSAYLSGIAADQPPFYANPAGIDLKENLVAGASPWPYPSMYHPYDAAFAGYPFNSYGMDLNGARRKNATRETTSTLKAWLNEHKKNPYPTKGEKIMLAIITKMTLTQVSTWFANARRRLKKENKMTWEPRNRVDDDDANIDDDDDKNTEDNDLLDAKDSGVGSTDDKDRSGRLGDMMTDRPGESNNSEWSESRPGSPNGSPDLYDRPGSMPPGAHPLFHPAALHHHFRPPAGSPPDIAAYHHHQQQLLQQHQQAQQNSLQTAVGGTAKPRIWSLADMASKDSKDSSSGAKDNHPELPPAHPGFYGHPGQQPSPGKILSPLAARIPNYSPYVRPDLYRGFYGPAAAHLGAPTQEFLEHQRTFGASLAAHNGPLGMNPLLWKAAVSGAANGHHFAPLSLTTSGGSSGGQQVAPPPVASPSASSSSSSMGCDVVHIPTSSGQSAAQHMMGPISSNSTASSSSSHSGKISPGVNVTSLSAKP

SEQ ID NO: 42685 - DNA, 5959 bp, DROSOPHILA
gaatctatttaactacttctatttggggtgatgtgatggtaacatgtctcatttgcagccaaacgacccaatgagctcaacaatcagcgtccagcattgggtcacacacaaaccgcacggtcgaaacccaatcagcgctatcgagagggctaccactatcacacatcccgccagagtcccacattcgtgctgggcgatgatcagggtgccggtccatccacgtcccgttccaatgataactctagtgcgtgatagttcttaatgcctcagccagacgaaggacacagcagggagagcttggccaggcgtccaaggaaggggaatagttacagagatctctaagccattaaattcgggaaaatcaattggaagcatgttgcagcactttggtcgacgtagaaagtgaacgaacacaacggacaaaattgttaattagtttaaaaccacacgcgaaactcgtcggaattagaagttgagacaccaagagaggaaatatttaagcagccgagcaaagcaaacaataataaatttaatatatattgtgtgtatgtgtactacgagccgagagagaaatttaaagaatttaagccacaagaaatttgaaacgcagatcaacctgatctacgcccatttgattagttatacgaacaccaacacccttgaaattggtcaatgtcgagctataactaaaaaggatattaaattggtaactatacggtatcaaggtaacgcgcggaaattgcaagcaaaattgaagattagaattggaagattacaatgagcatggacatggaaatcaacttgttataaacgtagttttgcttattttttaataaaaacaactaattcaagaaaaacaaaatcaactaatttcacttgttctttttagaaatcaaatctatttctcttctgtttaaatgtgttcaaatgtgacaatcaaatcattataatgcaacaagattattctagtgcttcggaaatgcatgcaacaggcttagatttacttcagccccaggtccttttcaattgtatgcgagcagacggccatcatctgatccttgacgttgacgaagttgcgaatagcagcgggcttggcctctggccaaccagccagatcgcggtagatggggcgacagaacttcatgcggaagttggagttggcaaattcgaggatctcatccagacgttttatcaagcgtgcacggataatcaagcgattcaatcggaagcgaacctcggcgttcttcgaactcttcaggttgtatgtggattccagtagattaatcttgccttcgttcaaatcgacaatgtccttgctctcgatcagtttgcccaggaagtcaatgagctggtgaatggaaatggtcgtcttgatctccgcactgtcagccaattcagccacgctcttagagctccagagactggccaattccttggtcacattagcgagggattcatcgaagttcggaatgacgggtggcattccctcggatttcagccacaagtcccagtcgacagcactcagcttatccttcttgtccgtgtcgatgaagtagtcatataaagcactctggaaatctttcgtctcaatcgacttgtaggcgtattttttcagatagtctctcaggaaaggctcaaaaacggttggtccgccaaacaagtcctccaagtagcgcaggaacgtcgaacccttaatgtaaggcactgaagagaaggcatcgtcgggtccacagttggatagatccaccaccagcttagtcagctcgggtgtcttgttgagctgagtgcggatgcactcctgcagatccgtgagattgctgagcatctaggaagagcgatagaaattgttgaaggcttgtaactgaactgcaactcaagtgatatgcttactttaaagtccaactccttggcgccctgcattcttcccacgatcttggattccacgaacacagtgaagccctcgttcaaccagaaatgctcgaagttcttgttggtcacaagattaccagtccagctgtgggctatctcgtgagccacaacgtcggccagagacttatcaccggccaaaagagtgggagttacgaaggtgaggcatggattctccatgccaccaaaggggaatgaggggggcatcaccagaagatcgtactgcttccagacatacggaccacacaactcagtggcagtctttagcatggtagctgtttcggaaaactcctcggcgcaggcatccacgatggcttcctcagcccagacactggagttctcccccagcgggcgggaaaccaatttgccaatggcaatggccaccagataagcgggaatgggcacctcctgcttgaatagtgtctttcccggttccttcttatcgataagggcgctcatcagggccgtgagctcgctgggatgctccactgtggcatcataggtaaacttaacagctggcgtgtcttggcagggaatcaccgagcgagcgtggattgcctggcattgggagaacatataaggatgctccttgcccaaagtctgggtgggattcagccactgcaacccactggcgctgcttgaagtctcgtaatcgatgcgaacgttaaggctagataggagtgttttagattattaatgactttcatagattagattatctatcgccgaggttttaccttcccttagccgttccagatggcaactccagcgttagcttctggccaatatcatcgacggcatcgctgataaagaagttgatcgggagctcactgcctccggccagcagcgtggcattggttacattgatgtcgcggacatcaaggagctaagttacatgtaaggtaaatgggtaaataagaagttctaggaacatgccgcggaatgaatatcttccagaattcttatgctggatccagtgcgttcccccaagtactcacaattttgtccagattggcagtcaacaccttgaagcgatggagcacgcttccttggattttggttgctgcaaagtcgatcttccagttgagagcactgtgctcagtggtgatcaaatcgggctgcgagtaagaactgggatccacgactcctaagcgacccatgttgcgtttttgtacttggtaaatcgggagtagtttgtgtgaagtgcacaagccgcgagtagagactgaaaaagagtaagaaatatttgaaaattgttaactttctgcgatagtgctatcgtatgccataaaaatgtgcacagataagccaaaagctgtggttaaattctaacagctgctgttgtgtggtttaagatatttacgttaagtgatgaccgcactttctatatagtatatttattcacgtacgttaaaataattcgtgggcggcgtcgatagatatgggtgcaaaatgaagcagatacaaatgagatgaataagttgcaattcactgccacacagccggtaaattgcagggttgtcgaggatcgcaaagtgttagacacaacaatctattaattatgaaataaattaagcagcttgccaaactaaatacgttatttccagtgccaagttactttctttaaattcttgctattctgacataaattgtaaagtctataaaaattaacctgaagcttagctgcctggcatcccttttgcagtattgccagcccaaaaaaatctcacgcttttagattagtgaagtcgccgccgttataccatgtaataaacaataaaatcacataaaatttggctatagaaaataagaattgaaaaaaaaaaattaaaacttcaataagctttttccatattttgtatttatcttaattacaatgatttcctatcagcatatcaacgcaagatataatccttgggataatccataatgttggggaagttctccagcgtttctttgtcgatatgatccagacgctggggaatagagcgcggcgtgcggatttgattcgtgacgttttgcaggatttcctcgggcacctgatcgtcggcgaacaagtgcagtctttgcatggtgtgcctgcgctgcagatttccgcgcatcgagttgtacacggccttcttcatcaccatcgtgggatccttctcgtgcagctgccacgccagggtccacgaagcgccaccaggatagccggtgtggtggaagtaaaccctcttcacccactcgtcaccgggcaaagcgatttcccgcgtgttgatcagcaccacatgatccccgcagtcatctggaaaattacatgtacggtttttattggatggccgttggggattacttgcttaacctaaaagtacaataatcactggtcaaaaataaggtatgaaatacctgaaccgtcattcagttgcgctccaaatagtagttttagtcttagcagaggaagtaactatatataatcggcgaccatttagtagatccttatgagtatgaggatttttaattaaacatatttgtttaaggattaaacaaacaaggattattaccgaattcatactactatttgaatcgcaggctgaatggtcaaataattaccgtttttggattaaaatttatttgttttcattttatacttgcagcagcaacaacaacaacaacaacaacaactaagaaaacacgccggtgatgtaatgacatcgaaataccccaaaaaagggcttaaatcaaacgctgtcgagatcgaaactaaacaaaaactgcgccaaaggataacacttactcattgggtggtaaatgggcttttggaggcccaataaatgcgttttaaccagttttgccgactcgaatggattctgccaggtgcaatcgtaaatgtgccaagtgcgcgcgaacgttgcccattgctaaatccggaggaaatttaatgattacctattgcacattgagggtagtgagcttacgcacctgcacacgcttcgcaatggacattttttgagatttttaattaaacaatttaaataaaaataatttctcagctggcagacagtgtgaccaaggtatgaagtttgaaaaatatcgtttaacaaagcgataataatgactaaaaaatgcaataccattcccttagcaaaggtcccaaccacagaagcagttcagacacattccaattggattcatattacacattaccgtgactcaaaccgtatggaagcagttcatcaattgtgttaagcagtactttttagcattgcaagcagtgtgacaacgaaattaagaaatgaaatgatttcttttaaaatatcttcttttaaaaataagacagggtatttttgttatttttcgtcttgtttttttgtggttttattttcgtttgtaatttcatttaaacattttctatagttactaaaattacttatgcactgtttattattaatattagttaaatattattgaaaatacattagttgttttacgaaacagttcataaacatccttggtacacttcgtcatttctttctgcctttccgctgccggatttgttgtctccctcgtcttctaatgcatttcggaaatgtttaaaaactaacaaataagtctagatttagttacagtttttgtttctcgcttacataaaattcccgtccgcttttctgcatttatttatttataataattttgtgtttcttttgccatacaatttatgaacttaacgtagatgcttttgttgttgctaattcgatttacaagtttgccaagtgcgcctttatagtttatagctacgcctcggatttgacatcccaaataccatataatacacacgagtcagattctcttttcgtttttgaatgctttctttcgatcggttcttttgcattttgaatgaaaatatatttgtttattattaatatataaaaggtatttacaaatttatgtttaatgaaattccctacttgatgcgaagtaactgttttccttttgttatcataatttttgttttcgtgtctgaaattattgtaataacttttcaagtgtgtgagca

SEQ ID NO: 42686 - DNA, 2106 bp, DROSOPHILA
ccagctgagaaattatttttatttaaattgtttaattaaaaatctcaaaaaatgtccattgcgaagcgtgtgcagcaatgggcaacgttcgcgcgcacttggcacatttacgattgcacctggcagaatccattcgagtcggcaaaactggttaaaacgcatttattgggcctccaaaagcccatttaccacccaatgatctctactcgcggcttgtgcacttcacacaaactactcccgatttaccaagtacaaaaacgcaacatgggtcgcttaggagtcgtggatcccagttcttactcgcagcccgatttgatcaccactgagcacagtgctctcaactggaagatcgactttgcagcaaccaaaatccaaggaagcgtgctccatcgcttcaaggtgttgactgccaatctggacaaaattctccttgatgtccgcgacatcaatgtaaccaatgccacgctgctggccggaggcagtgagctcccgatcaacttctttatcagcgatgccgtcgatgatattggccagaagctaacgctggagttgccatctggaacggctaagggaagccttaacgttcgcatcgattacgagacttcaagcagcgccagtgggttgcagtggctgaatcccacccagactttgggcaaggagcatccttatatgttctcccaatgccaggcaatccacgctcgctcggtgattccctgccaagacacgccagctgttaagtttacctatgatgccacagtggagcatcccagcgagctcacggccctgatgagcgcccttatcgataagaaggaaccgggaaagacactattcaagcaggaggtgcccattcccgcttatctggtggccattgccattggcaaattggtttcccgcccgctgggggagaactccagtgtctgggctgaggaagccatcgtggatgcctgcgccgaggagttttccgaaacagctaccatgctaaagactgccactgagttgtgtggtccgtatgtctggaagcagtacgatcttctggtgatgcccccctcattcccctttggtggcatggagaatccatgcctcaccttcgtaactcccactcttttggccggtgataagtctctggccgacgttgtggctcacgagatagcccacagctggactggtaatcttgtgaccaacaagaacttcgagcatttctggttgaacgagggcttcactgtgttcgtggaatccaagatcgtgggaagaatgcagggcgccaaggagttggactttaaaatgctcagcaatctcacggatctgcaggagtgcatccgcactcagctcaacaagacacccgagctgactaagctggtggtggatctatccaactgtggacccgacgatgccttctcttcagtgccttacattaagggttcgacgttcctgcgctacttggaggacttgtttggcggaccaaccgtttttgagcctttcctgagagactatctgaaaaaatacgcctacaagtcgattgagacgaaagatttccagagtgctttatatgactacttcatcgacacggacaagaaggataagctgagtgctgtcgactgggacttgtggctgaaatccgagggaatgccacccgtcattccgaacttcgatgaatccctcgctaatgtgaccaaggaattggccagtctctggagctctaagagcgtggctgaattggctgacagtgcggagatcaagacgaccatttccattcaccagctcattgacttcctgggcaaactgatcgagagcaaggacattgtcgatttgaacgaaggcaagattaatctactggaatccacatacaacctgaagagttcgaagaacgccgaggttcgcttccgattgaatcgcttgattatccgtgcacgcttgataaaacgtctggatgagatcctcgaatttgccaactccaacttccgcatgaagttctgtcgccccatctaccgcgatctggctggttggccagaggccaagcccgctgctattcgcaacttcgtcaacgtcaaggatcagatgatggccgtctgctcgcatacaattgaaaaggacctggggctgaagtaa

SEQ ID NO: 42687 - protein, 613 aa, DROSOPHILA
MGRLGVVDPSSYSQPDLITTEHSALNWKIDFAATKIQGSVLHRFKVLTANLDKILLDVRDINVTNATLLAGGSELPINFFISDAVDDIGQKLTLELPSGTAKGSLNVRIDYETSSSASGLQWLNPTQTLGKEHPYMFSQCQAIHARSVIPCQDTPAVKFTYDATVEHPSELTALMSALIDKKEPGKTLFKQEVPIPAYLVAIAIGKLVSRPLGENSSVWAEEAIVDACAEEFSETATMLKTATELCGPYVWKQYDLLVMPPSFPFGGMENPCLTFVTPTLLAGDKSLADVVAHEIAHSWTGNLVTNKNFEHFWLNEGFTVFVESKIVGRMQGAKELDFKMLSNLTDLQECIRTQLNKTPELTKLVVDLSNCGPDDAFSSVPYIKGSTFLRYLEDLFGGPTVFEPFLRDYLKKYAYKSIETKDFQSALYDYFIDTDKKDKLSAVDWDLWLKSEGMPPVIPNFDESLANVTKELASLWSSKSVAELADSAEIKTTISIHQLIDFLGKLIESKDIVDLNEGKINLLESTYNLKSSKNAEVRFRLNRLIIRARLIKRLDEILEFANSNFRMKFCRPIYRDLAGWPEAKPAAIRNFVNVKDQMMAVCSHTIEKDLGLK

SEQ ID NO: 42688 - DNA, 11955 bp, DROSOPHILA
tgccgaacgcaagtgcctttgtgtacgaagaagtaaagtgtgaattaactaaattagcgcagataattgctcgtatagtatgtgtttatatgcatatatcacagatacttaaaaattctctacaaatttatcaaacgaatggtgtgtgtgtgtatgtgtgtggctaattacattattacgtttagttaactattaatgtgtgtgcacggattaattatttggccgagtatacgttattgaaagtcaaaggtccaaatgggttaggcaaattcttaaaactaatgcttcgctcctggaaattcacaggatactagcactaatacaacgtgatgtttcctaaagatcttatgcggtagctatctaaaattattaagttgcatggattaagcacttaaggtaggaaatgttagtcttaagacaaaaagttcgcttgatttataacacgttggagtagtagtagctggcattagtatactcaacgtactcaacgttctccactcgaaagatgaatgagttcgtgcggtgtgcgtttatttcgagtcattaaacttggagccgtatgactcaaaccccgggccccaaaaaacgcatgacaagcaacccaaagtgggcggctcagatgtctggggcccaccaccgcaccaccatcaccaccgcaccaccatcaccaccgcaccaccaccatcaccaccaccgagacatgttcgtctcgcagaatttcagcggttgtgtgtgaatatgctaattaaagttataaagcgaaataatttatgatatggtaggaaataaagttttattgccatacttaagctacatttattgcaaaataattagtgtagttatcgctatctgttaaacgtactcgtaatcgtaatcgcggattgcccgccaacttgcacttgtcccgccatctcgaaatgtgtaagtagtttcgcttgctatttggtatctggtaactggtaactgctaactgctctccactaaccggttcaaggtcgaattacgacccggaacgcccgccctccgttagataggcattactagtgacgcccatgtgcccatgcccatgcccgagtccatgtccatgcccgagtccatgtccgtggccatgcccatgtccatgactgtgtccgtgtccatatccactgtccgtattactgtacaaaatgttgaccatggaagccaccgtcaccggagtgacggaatgcatcgaggaactgtggctgctcccgctgctgctgctgctgccgccgctgctgttcagcttcatagtgggtggtgtctggggcggagtatcgggctggatctcgggaaaccccacccgctgtggcgccggatggatatgagtgggtggcagcttgccggtggaggaactggaactgctgctgctgggcagatgcatgcccatggcttcggtgtacgccgtaggtatccgcgaatatggcgatccgccggcgtagctgctcatcatactcagcggcgaaccgagctccatcgagtggtgcggatgatgatggtgcgggtggtggtggtgctgttgctgctgctgcaactgctgcagctgctgttgctgatgctgctggagcggctggtgaggcaactgctggtccgccgatgagggtggatagaagttctggccgaggtacgccgcggtgggcggtggtgtcttgcaggcggctgtgtcggccacgctccagatcttgggcttgctcgccggaactgggatgccacagtctctgctcagcgggtttttttgggccgcaaattcacccgattcctcctggccatagccacccggatgatagtacggctgatccatttgatggtgctgcagctgctgctgattctgctgctgctgctgctgctgttggtggtgttgcatttgctggggatgagggtgcgtatgcgtgttgtgggattgcgcatacgaactgtatgccgcgtgcattggatgggcgcctgggggcgtggcatatggcgccagtccacgcatggccaccagattgtgtggctcccggtccagatccagtttctggtcaccactactgtccacctccttctccgccttgcccagttcggatttgataagttgattgccgggatctaaaagattagagtgagagagagagggagggagagaccatgtggagacacaaaataaatttaattaatttcaagtcacaggcaggaagcagacaagttcttagaggactgcaaaacttggcacttcgaggaggtggaactcttggcagctggcagctggcagtggcaaaaacccttgaaattgttggtgggcgttgatgcgtgcaaccctcgcagccagcggagaaagctttcagcagcaaaagactcgagtttccgccgactaccggcccaagccccccccccctttcttccgcccctacccctgctgcgttgcaccatttctatgtgtcgccaactcgaacaaggccactttggagacggagtacacggagaaaatgggtcggaaaaaccactggcttgtggccatcttaacagagggaactttattcgaaaaaagcattgctcctttaagttttgattgtaaaatcttttctaaacttgaatttattgaaaatttaaggttcttcgatatgttacatattttcgtgcagtgcatcttagaatcggagtgcgggcgcaaggccactttgccaacaatgtgctgtcaacttccggggaggatgtcgcctaagcagtcagacaaataaacggacgacggacttcggacggactttatacggactttggagcgtcggacgggcagacgaatgttgcataacattcgcctcgccacataaattgtacttaaaagcccagtgccacaaatctgctaaaggggcgggtcagctagtcagccagccagccagccagccatccagtcaggccaagaagggcgtaggaatcaatggggcaaggcgtttggaaaacaatatgccggagcttaagaaattacaaagagatcgctgaggactactaattgaggaggtcaggaatgggcaggcacttggactcaccgaaagcttctgtagagagtttcccaccatcgccagcatccttttccttctcatcgtcggacatcatgccatcatcatcgtcctccgtcttattcttcggctcccacgtcatcttgttctcctttttcagccgacgacgtgcattggcaaaccacgtggacacctgggtgagggtcatcttggtgatgatggccagcataatcttctcacccttcgtcggatatggattcttcttgtgctcactcagccaggccttcaacgtggccgtggattcccgcgtggcgttcttccgcctggcggcgagatcatagttgggtccgtatctgcggaatgaaaatcatacatacaccccgaatcaatatggctcattgcagagttgtagttgcgtcctaatatcatggccaccactaatgagtttgcttagggcaacaccgattttccggcctgctatcagctttttgggtaaacaaagcgcgcatcacacaccttaaagacactaatcagttattggtaacaatcgctgataagagtcgtacgctcccccaccgccggaatgcatttgcaacttcctctcgtctaggtcaacatcaaatggcaatggaattggtattcctattcccatttcagacaaaaccgcgccccggggctcaaactctaagccagacatacccttttaagcgataaataaaaagaaacccggcagacgacacgacgcgaaagtttttgtcccatggcaacattttaagcccacttaagtttcccatttgtatatttgtacagtggaacttcttgaactacagctctattgtttctttttagtgcctgccacaactgctgctttacaatctgatgataatatgatttgttatatattatttcatataataataataatttaatttgttttactgaaagtctgcccccaagccaattgtcttagtttttagatgctcacccgtaggccgccagcgtgggatcgtaggaatagtatccggtggttgactgcaggctggcggatgtccaggcgctcatctcggtgctgggactggtgtccttgatgccgtagggattgctctggaattgagtgcggcaatgggccatcaacgaattagtcacaacttctggcagccggaggcagtgagccccgtgtaagctggtctctttggtagccagtgagtttgtcagccccgaggtaatcaggtaatcgtggcagttacaagttaccgggcctaacgagctgacggccaacatggcgatatctgctcggcctgtcgactcgcatttgcgcggactttcgccgaatgcacaaagccaattagccgggacttttcagctacccagtgattcccatgcccaagctcatacccgatccttaccagaggtgcgtagaaggccgagttgtccactccgatgctggggtaagggttctgttcgttagagggatacggtccgccgtagacgccaactcccacgccgccggagggcagggccatgcgggaatagccaccgatggccagtcgggccggatcgtactggcaggagcacacggtttgtcccgatacgggatccgtgatgatgggtctgccgttctcgcaacaggatccccggctgggcaagtcctgggcagcagatgaaaggccaacgggcacatcgccaccaaccacatcctccgccggcgatgtggagagacccttgtggcccgcatgatgcgacgactgggaaacagcacctggactcagaggaccggcagtcaggccggtggccgtcgagccgcccgagggactcagcgaagcctcattcgtgccggatagcggcgatcctccgccatggccgctctggctatcggtattggcggtagtcagctgcaaagatgccaaagggaaaaaagagcaaattttagcaatgccgaaaaaaggaactcgaacccgaaaaaatgtatggcggaaaggggaaacctacactgagcaaaatatccacttaaatattaataatagggtttaagggaagagagtaaaacttaattagttcgttctcttaattctgaattacaaagacattaataactatttacattacatgaatttcttagcagcggtgtttatttatttaaccccatttttctctcagtgcacgaacaggtgaagttggcaggacccgcaagagcaaagagaagtgaagcgaagggacgcaggagaggtaagcgcaaaggcatgtccctgccgaccgaccaggtcgaaatcaacaaagcagattaagatgataactccaaatgtcaaaatattttattggcctggcgcattttgcgatccgttccatctattttcacttcattaattttcaatttatcacagtcagatttcagataccgcttcttcgtcccaagccgagcacatcgcacattgaagccagagtccagaatccagaatcggggctcttttgaagagggttctgttcggttcggttctcgagcgtcccgagttgagtatcagtggaccgatcgatcgagcgggaatgggcacggccctggccaaaagggcaatcaaatgatgagggacagggcaggtagactccgctccctcgccgcactcccctcctccccctccaccgatttgaccctctctatatggcatatcctctgttgcgataaccgcagcgaatcggtgacatctgagccgttggttgctttccagcctcgtgattgggaatcgatcgatctgagctggaaaatcccggaatatagatgatgactgactgtcagattccacttcacgcgctttcaaatcgattattgcatctgataccaatgcctaataacaatatctcatacttatatgcataatcaagtggctaccgtaacgttttgaccaaatttctccgcctatcacggctactgaacgattctgcccatgtgatttaaataataatggtaattgaaggctaaacgagctgattcgccaacacctcctgtcgactatctaatcatcggggcaatttcgcagcaacgtcgaaaaagcagcaggaaattgttgcataatgaaggtgtttcatgaatgaaatctaatgaatactgaatgaatggaagtgcctcgtcgtcgactgtctccactaatgtacaaaacgctgggcgcgctcatttcttattatactttatattgcttcgctttatttgttttttttttttttttccttggcgattcgaacatcaatttcagtttttgtggccgcccataaaaaacacatatcggcgaggacgagaacgagaacgaggacaggcgactgggatctgcggacctgggcgcgagctggacgcgtagctggactggctggtcaagttctcgtttggaacagtgcttattatcggcacgcaagtcagtttatttttaatggttcccactcacccaccactcggctgcaaaaataaaaccaaaaaaaaaaaaaaaaagaatcgcaggaagtgcagcgaagagcgcccagccgctgagtttatcgcaaggtgactgcagataggataagccacactctgtagaaccaacttggaggcagggattgggttcgggattgggtctgggattgggcatgggttagggattgggttgggttgggttactattcagcggaaatggtgaaacttgtcggcagctcctaaacgttgccttaaagttgggcgctctttttatgactttttggacagttttgaagtcggtgtcaaattgcggcaagtttaataaggaatatttcccggagttgccacaaagaatattttgtattcacacttgtggctatctgccatctatcttaatcacttggtgagttcgcataaagtttgttgccttcacatcaatttaaactctttaagctgctcgagtatttcatataaatattgtggatacaaaaatgctataaatttattattactgatagtaatattctgggtacaaaaaagagtaagttgtaataaaatgtattcataaatatatgtatctgtggtaattgttgtaatacatacgaacatgtgttgttggaccataatgtaataaaactaaaaaaaaaattaggagcacaaaaatcgatcaataataaattgtggtctctagcttgctataaatattatttatgtttatataaacttgaaattattttctagcaataaatatgcaattccaactaagaacctattcttgaaattactaatattaaattgctaatacccagcaaaatcaaagacctgcaaaaaccagtcatcaatattgccagaatgtgtttcccactaattgccagtgagaaaccatttgaagggcaggcaatcaccactaagacaagcaatacgagcccgatttttatgcgccattaccaaagttcaaagtggcaattcaaccttgcatctttagccgcaaaacgcaaacatgaaatctgcaaaacagctggacaagcgaaagtccaaacgagctgaaaaccaacagatacaagagcataaaacctaaacaagctggaataaagcgggcgaatattcattgaccgtaattcggttgaaccggcatggacatcgtgtaaatctctatctctgcctttgatgtgcccacatccatatacgcatccagatgcagttccagatgcacagatgcagatacgtatctgcagatacctttaccgataccgctacagatggccacccgcacccattggggccaagatgttggtggagctggtgccgtcactttacggttattaattttatgatttatgttaaagctcacgagtccgcctaccaactcctgcctacccccctcccacccattgccaattcacgaacgcacgagtacgatatggttaggatggtatggtatggtatggtttggtatggtatgggatggcatgggatggcacggtatgggatagtcaagacaaaggagatcggcattgttgtggttattgggtgctgctgttgtttctgctaccgctggagatgcgtttatggatttggtttttgcactcctaacaacaacgacgattgtgaaacaaaagctattggcctgggcttggttggttagttggaggggctttccttcagttgggcgggttggggggttggcttgacgccaggccagaacaataagcgaaaatatgagaatcccagctcggcgacaaggaagctgaaaatgcgaaggagtccctacaaacaaacacatgttcgcattcgagttcgcagtcagtcctcctcttggatttggcatattctcacattcatccgcaggattgcgttgccaagcgagtatgccatattcatacagatacccaggcccactttaaagggtgcactgggaaaaaataatactacaaaaaatcatattaaatcctggactacatagctgaaagagttcaatagtatgaaaagtctaacaattctcactttctagtttctagatacatttaacaactgctattttactgaataaattaagataaaatcaattgaatttatttaaatatctatatagaacttgtagaaacattacttaaacaaaaaccttcctgaataagaatttttaaaatgaattaaatttatgtagaatttatgtttgttatctaaataaaaggtatggatataagttttatggtagtgaacagctaagtttaccgatttatgcttctatttcgcttctatgtcattaaaataaatttgagaataagcccctaccaattgcccacattttttctcgccgtgcattgaatggccaaagggactggctccaaagtgcgtttttgctaatgcgaataagttgctcggttttttgtggggcttgcttattgaattaagttggggcgcagaatactatggttcgcagtggaacaactctttcgcaactcaactgcggtctcaatgtttgcattaaaaattcataaatcaattatggaatgcacactgcgaaatattagttttttctcgcatcatttacgggcttgtccttttgcgtcccaatggagatggagatggggaatttgggggggcttcagatggagcctatgtgaatccaggactcgacatcgtcgcgcactttttgctgccttagaattttagttattttgccatgaaatgcgtgaacagctcgcatgggaagttaagaattcgatgtgcgatgtgcctgcaagttcttttgctactgccaactgtcagccgttgattaaatttatatattgtcgtttttttttatatttggaatgccgtcttggcgtcgaaattaaaattaaattaatgagaacccgagtgtgtgcactgcataaatttggcacccgaatgccatatcaactgaccagtctttcattggtggcttagtcgcatttagtggcttttagtggctttagtagacgtatgcaaatgagccgaaaacgatgacaaaattctgttggctcttaatcgattgcaaggcaaaaggctttttgcacatctccagccataattatagtcgataatctgaacgttcattattttaattattgtaatttaccaagtttgcatattataataaatggtgcaccactccgccggcggcttcattagcataaatttatgccagccaccgtggtcaggaatattgtatacatacacacatatatacatatgtatatatataaatgtacataaattggcagcaggataaacgcactagcattgacgcatttgaccacatagtagtcgttgaacatggcttacacaggcattgcaagggctttgtagctgcaagtgtttcacttccccccgtttgggccaactaatttgaattactgagctccgaataccgggtaattatgaccagacctcggacgatgcactgccaccggaatgccccaccagaccccccccttcggttaccagcgatttgcatccaaggcggtgacggctgtcctaaattgtgaaacatttcttggcggcggggcggccattatggctatatccgcatatatatatatatatctatatatatatgtatgtatatatatagggatccaggagccccaaccggtgccaaagtgcttgaatattcatgtgcagtggctgctccccaaacccgccggcttaatatgtaaatttaaagttatttcgcaccgtccattattaaagatttcccttttcgcacatgccaaaatattcaactgactcagtttctggttttatgaaacatcttttgtgtgtgtgccaaatattattttagtccgcactaaataaatagtatattcaagtgtctcttgaaatgattaagttatggctgcatattgaaatggcacagctgtaaatcaaaatataataaatacatataacgaaattaataaatttaatttcatggccaatataaattgttatgactaagccatctgttttaaatttaaatttaaggcacccagtagcaataattcagaaatttgctctttcaactggtttttcgcattctactcaatttaaatcaatgtatttataaatcttcagattctattcacaataattattgtaagcaaagtgctctttataatatggtatttatggccttcagtttgaacacaaattatgagattacaaaaaaaaatttggataaggtttttaattgatttggaatttgttacttttaaaattgaatatattattgacaaaatctaaagggagcaacattttcaaagcaaatataaatgtatatataagatacaatattggatccatactaaaagattccttaaaattgttgtctgtgctaaataaccgtttaaaacttaagttaagtttgcttactaatcaatacagacttaaaaaaaacggttaactgttaatctctaaacaaaccaccggcataaacccacctgatttgccgtcgggtagccagcgtatccaaactgcgcatatgcagccattgtctcgctggctgagttggcctaaagagcggcgacacgcgagttcactgtgccggggcttcactgtggggcgtccctcgttgtttgcttgttgttttcttatttttttttgcgattgcggatgcggatgctggcggagccctcgaaaaaggggtggccaaggatgtggggatggtgttgggtgcttaagggaggttcaagtgggtggccagtgggtggttgggttgggtggctgggcggatttggcgtgcgtgctcgacggctaagcactctgggcgcttttgttgtttgctggcttgttgggtgttgtgctattgttgttgttgctgctgctggctggccttgttgaaaattgataaaacaaattgtcgatgtcgagcagttctgttaatgtcgccggagccggaaaatgttttgtttgttttgtgtgactttgctgttttatttcgctcgtccgttttcatccgttttaacttgatttttattgactctgtttgactctttggcggccggttaccaaaatggttaaaaaaagacacacacagacgacagccgggcaaagcaaattggattcaagtgtttgccgcaaacagatttacaaatgtacgcggctcttcagtcttcggtcaaaagaatgtgtcagtttggtttgcgagtttacccactgattggtatttcagttttttccacactgtatcgaaattttttaaagtcagcttaggaaactttttgatatgtgatccataataataaacatagtttcgaatttatggcgagtttcttttgatatttaacgagacatttctagagaggtttgcctgtcttttcgggtccctttttttcgtatttacttttatcataactattgcacgcacttcattatctacgtcggttgcatctgccgatccgatccgctggcaatgctccagtaaaaacgggttccgttccaacctgtcagcggtatctccacggtgacgacggcagtgactgcgactcaataaccgactgtgacttatccggt

SEQ ID NO: 42689 - DNA, 2103 bp, DROSOPHILA
gccaactcagccagcgagacaatggctgcatatgcgcagtttggatacgctggctacccgacggcaaatcagctgactaccgccaataccgatagccagagcggccatggcggaggatcgccgctatccggcacgaatgaggcttcgctgagtccctcgggcggctcgacggccaccggcctgactgccggtcctctgagtccaggtgctgtttcccagtcgtcgcatcatgcgggccacaagggtctctccacatcgccggcggaggatgtggttggtggcgatgtgcccgttggcctttcatctgctgcccaggacttgcccagccggggatcctgttgcgagaacggcagacccatcatcacggatcccgtatcgggacaaaccgtgtgctcctgccagtacgatccggcccgactggccatcggtggctattcccgcatggccctgccctccggcggcgtgggagttggcgtctacggcggaccgtatccctctaacgaacagaacccttaccccagcatcggagtggacaactcggccttctacgcacctctgagcaatccctacggcatcaaggacaccagtcccagcaccgagatgagcgcctggacatccgccagcctgcagtcaaccaccggatactattcctacgatcccacgctggcggcctacggatacggacccaactatgatctcgccgccaggcggaagaacgccacgcgggaatccacggccacgttgaaggcctggctgagtgagcacaagaagaatccatatccgacgaagggtgagaagattatgctggccatcatcaccaagatgaccctcacccaggtgtccacgtggtttgccaatgcacgtcgtcggctgaaaaaggagaacaagatgacgtgggagccgaagaataagacggaggacgatgatgatggcatgatgtccgacgatgagaaggaaaaggatgctggcgatggtgggaaactctctacagaagctttcgatcccggcaatcaacttatcaaatccgaactgggcaaggcggagaaggaggtggacagtagtggtgaccagaaactggatctggaccgggagccacacaatctggtggccatgcgtggactggcgccatatgccacgcccccaggcgcccatccaatgcacgcggcatacagttcgtatgcgcaatcccacaacacgcatacgcaccctcatccccagcaaatgcaacaccaccaacagcagcagcagcagcagcagaatcagcagcagctgcagcaccatcaaatggatcagccgtactatcatccgggtggctatggccaggaggaatcgggtgaatttgcggcccaaaaaaacccgctgagcagagactgtggcatcccagttccggcgagcaagcccaagatctggagcgtggccgacacagccgcctgcaagacaccaccgcccaccgcggcgtacctcggccagaacttctatccaccctcatcggcggaccagcagttgcctcaccagccgctccagcagcatcagcaacagcagctgcagcagttgcagcagcagcaacagcaccaccaccacccgcaccatcatcatccgcaccactcgatggagctcggttcgccgctgagtatgatgagcagctacgccggcggatcgccatattcgcggatacctacggcgtacaccgaagccatgggcatgcatctgcccagcagcagcagttccagttcctccaccggcaagctgccacccactcatatccatccggcgccacagcgggtggggtttcccgagatccagcccgatactccgccccagacaccacccactatgaagctgaacagcagcggcggcagcagcagcagcagcgggagcagccacagttcctcgatgcattccgtcactccggtgacggtggcttccatggtcaacattttgtacagtaatacggacagtggatatggacacggacacagtcatggacatgggcatggccacggacatggactcgggcatggacatggactcgggcatgggcatgggcacatgggcgtcactagtaatgcctatctaacggagggcgggcgttccgggtcgtaa

SEQ ID NO: 42690 - protein, 693 aa, DROSOPHILA
MAAYAQFGYAGYPTANQLTTANTDSQSGHGGGSPLSGTNEASLSPSGGSTATGLTAGPLSPGAVSQSSHHAGHKGLSTSPAEDVVGGDVPVGLSSAAQDLPSRGSCCENGRPIITDPVSGQTVCSCQYDPARLAIGGYSRMALPSGGVGVGVYGGPYPSNEQNPYPSIGVDNSAFYAPLSNPYGIKDTSPSTEMSAWTSASLQSTTGYYSYDPTLAAYGYGPNYDLAARRKNATRESTATLKAWLSEHKKNPYPTKGEKIMLAIITKMTLTQVSTWFANARRRLKKENKMTWEPKNKTEDDDDGMMSDDEKEKDAGDGGKLSTEAFDPGNQLIKSELGKAEKEVDSSGDQKLDLDREPHNLVAMRGLAPYATPPGAHPMHAAYSSYAQSHNTHTHPHPQQMQHHQQQQQQQQNQQQLQHHQMDQPYYHPGGYGQEESGEFAAQKNPLSRDCGIPVPASKPKIWSVADTAACKTPPPTAAYLGQNFYPPSSADQQLPHQPLQQHQQQQLQQLQQQQQHHHHPHHHHPHHSMELGSPLSMMSSYAGGSPYSRIPTAYTEAMGMHLPSSSSSSSSTGKLPPTHIHPAPQRVGFPEIQPDTPPQTPPTMKLNSSGGSSSSSGSSHSSSMHSVTPVTVASMVNILYSNTDSGYGHGHSHGHGHGHGHGLGHGHGLGHGHGHMGVTSNAYLTEGGRSGS

SEQ ID NO: 42691 - DNA, 2502 bp, DROSOPHILA
atgtaaggtaaatgggtaaataagaagttctaggaacatgccgcggaatgaatatcttccagaattcttatgctggatccagtgcgttcccccaagtactcacaattttgtccagattggcagtcaacaccttgaagcgatggagcacgcttccttggattttggttgctgcaaagtcgatcttccagttgagagcactgtgctcagtggtgatcaaatcgggctgcgagtaagaactgggatccacgactcctaagcgacccatgttgcgtttttgtacttggtaaatcgggagtagtttgtgtgaagtgcacaagccgcgagtagagactgaaaaagagtaagaaatatttgaaaattgttaactttctgcgatagtgctatcgtatgccataaaaatgtgcacagataagccaaaagctgtggttaaattctaacagctgctgttgtgtggtttaagatatttacgttaagtgatgaccgcactttctatatagtatatttattcacgtacgttaaaataattcgtgggcggcgtcgatagatatgggtgcaaaatgaagcagatacaaatgagatgaataagttgcaattcactgccacacagccggtaaattgcagggttgtcgaggatcgcaaagtgttagacacaacaatctattaattatgaaataaattaagcagcttgccaaactaaatacgttatttccagtgccaagttactttctttaaattcttgctattctgacataaattgtaaagtctataaaaattaacctgaagcttagctgcctggcatcccttttgcagtattgccagcccaaaaaaatctcacgcttttagattagtgaagtcgccgccgttataccatgtaataaacaataaaatcacataaaatttggctatagaaaataagaattgaaaaaaaaaaattaaaacttcaataagctttttccatattttgtatttatcttaattacaatgatttcctatcagcatatcaacgcaagatataatccttgggataatccataatgttggggaagttctccagcgtttctttgtcgatatgatccagacgctggggaatagagcgcggcgtgcggatttgattcgtgacgttttgcaggatttcctcgggcacctgatcgtcggcgaacaagtgcagtctttgcatggtgtgcctgcgctgcagatttccgcgcatcgagttgtacacggccttcttcatcaccatcgtgggatccttctcgtgcagctgccacgccagggtccacgaagcgccaccaggatagccggtgtggtggaagtaaaccctcttcacccactcgtcaccgggcaaagcgatttcccgcgtgttgatcagcaccacatgatccccgcagtcatctggaaaattacatgtacggtttttattggatggccgttggggattacttgcttaacctaaaagtacaataatcactggtcaaaaataaggtatgaaatacctgaaccgtcattcagttgcgctccaaatagtagttttagtcttagcagaggaagtaactatatataatcggcgaccatttagtagatccttatgagtatgaggatttttaattaaacatatttgtttaaggattaaacaaacaaggattattaccgaattcatactactatttgaatcgcaggctgaatggtcaaataattaccgtttttggattaaaatttatttgttttcattttatacttgcagcagcaacaacaacaacaacaacaacaactaagaaaacacgccggtgatgtaatgacatcgaaataccccaaaaaagggcttaaatcaaacgctgtcgagatcgaaactaaacaaaaactgcgccaaaggataacacttactcattgggtggtaaatgggcttttggaggcccaataaatgcgttttaaccagttttgccgactcgaatggattctgccaggtgcaatcgtaaatgtgccaagtgcgcgcgaacgttgcccattgctaaatccggaggaaatttaatgattacctattgcacattgagggtagtgagcttacgcacctgcacacgcttcgcaatggacattttttgagatttttaattaaacaatttaaataaaaataatttctcagctggcagacagtgtgaccaaggtatgaagtttgaaaaatatcgtttaacaaagcgataataatgactaaaaaatgcaataccattcccttagcaaaggtcccaaccacagaagcagttcagacacattccaattggattcatattacacattaccgtgactcaaaccgtatggaagcagttcatcaattgtgttaagcagtactttttagcattgcaagcagtgtgacaacgaaattaagaaatgaaatgatttcttttaaaatatcttcttttaaaaataagacagggtatttttgttatttttcgtcttgtttttttgtggttttattttcgtttgtaatttcatttaaacattttctatagttac

SEQ ID NO: 42692 - DNA, 426 bp, DROSOPHILA
atgacggttcaggtatttcataccttatttttgaccaatgactgcggggatcatgtggtgctgatcaacacgcgggaaatcgctttgcccggtgacgagtgggtgaagagggtttacttccaccacaccggctatcctggtggcgcttcgtggaccctggcgtggcagctgcacgagaaggatcccacgatggtgatgaagaaggccgtgtacaactcgatgcgcggaaatctgcagcgcaggcacaccatgcaaagactgcacttgttcgccgacgatcaggtgcccgaggaaatcctgcaaaacgtcacgaatcaaatccgcacgccgcgctctattccccagcgtctggatcatatcgacaaagaaacgctggagaacttccccaacattatggattatcccaaggattatatcttgcgttga

SEQ ID NO: 42693 - protein, 141 aa, DROSOPHILA
MTVQVFHTLFLTNDCGDHVVLINTREIALPGDEWVKRVYFHHTGYPGGASWTLAWQLHEKDPTMVMKKAVYNSMRGNLQRRHTMQRLHLFADDQVPEEILQNVTNQIRTPRSIPQRLDHIDKETLENFPNIMDYPKDYILR

SEQ ID NO: 42694 - DNA, 23732 bp, DROSOPHILA
ttaacctaaaagtacaataatcactggtcaaaaataaggtatgaaatacctgaaccgtcattcagttgcgctccaaatagtagttttagtcttagcagaggaagtaactatatataatcggcgaccatttagtagatccttatgagtatgaggatttttaattaaacatatttgtttaaggattaaacaaacaaggattattaccgaattcatactactatttgaatcgcaggctgaatggtcaaataattaccgtttttggattaaaatttatttgttttcattttatacttgcagcagcaacaacaacaacaacaacaacaactaagaaaacacgccggtgatgtaatgacatcgaaataccccaaaaaagggcttaaatcaaacgctgtcgagatcgaaactaaacaaaaactgcgccaaaggataacacttactcattgggtggtaaatgggcttttggaggcccaataaatgcgttttaaccagttttgccgactcgaatggattctgccaggtgcaatcgtaaatgtgccaagtgcgcgcgaacgttgcccattgctaaatccggaggaaatttaatgattacctattgcacattgagggtagtgagcttacgcacctgcacacgcttcgcaatggacattttttgagatttttaattaaacaatttaaataaaaataatttctcagctggcagacagtgtgaccaaggtatgaagtttgaaaaatatcgtttaacaaagcgataataatgactaaaaaatgcaataccattcccttagcaaaggtcccaaccacagaagcagttcagacacattccaattggattcatattacacattaccgtgactcaaaccgtatggaagcagttcatcaattgtgttaagcagtactttttagcattgcaagcagtgtgacaacgaaattaagaaatgaaatgatttcttttaaaatatcttcttttaaaaataagacagggtatttttgttatttttcgtcttgtttttttgtggttttattttcgtttgtaatttcatttaaacattttctatagttactaaaattacttatgcactgtttattattaatattagttaaatattattgaaaatacattagttgttttacgaaacagttcataaacatccttggtacacttcgtcatttctttctgcctttccgctgccggatttgttgtctccctcgtcttctaatgcatttcggaaatgtttaaaaactaacaaataagtctagatttagttacagtttttgtttctcgcttacataaaattcccgtccgcttttctgcatttatttatttataataattttgtgtttcttttgccatacaatttatgaacttaacgtagatgcttttgttgttgctaattcgatttacaagtttgccaagtgcgcctttatagtttatagctacgcctcggatttgacatcccaaataccatataatacacacgagtcagattctcttttcgtttttgaatgctttctttcgatcggttcttttgcattttgaatgaaaatatatttgtttattattaatatataaaaggtatttacaaatttatgtttaatgaaattccctacttgatgcgaagtaactgttttccttttgttatcataatttttgttttcgtgtctgaaattattgtaataacttttcaagtgtgtgagcatttttgtttagcttacattaattttttcatgatctttttttcttcgaactcaacaacaaaagtgtatgttacataacgaaccagagccagattatccacaaaatgccaacggcctacagactattttttggcaccgaatcaaacagaataaaattaaatgtacagaatacacatgagtagaatatgaaaatgcggacagaaagaattgcacaaccccgaatacagtcgaactccacttactggataaaactattgatgaaacttcgaatcgttttgaagtaaaatgggaacactttttgataaaattattgaataaagtacaaatgatttgggtatttaaagaagtattcaattgtacaccagaatttcagcacgggtgtcaatattttgcaagacaacttttcgagtttatgaagatcgactgcagctcctcacgttcgagcttcctgccacgccctctgcgcgccctttgtttttagagaaccgcatgtgaggccggggaagccgagcccgttaccttctggagcatttgcatgagctgctcggtggccgactgattggccaccacgcccaagcccaggacacctgaaccaccgcccacggcaccgccaccccctgctccgacgcccgatggcggcgaggagatcgatgtgcccgccgaggccgaggaagaggacgacggggtcagcgccagcttggattctgggagcaacaaaagaagctggattagattcggttcgattgtctacggactgccctgcatactgtcatcgctctccaggtaggtgacgtaggagtcggtgctgtccggatggtggtgcgaggtgatcccggagtccaaactgctgcctccgggctgctggttcggctgctggttctgatggttgtgcggtccgccggggggcggggggtgctggtggggaggtccttgcgccggatgcgagtgcggatgcggcggcagaatgggcatcccgttcaggtcgtagccgtgcatctgcgggaagggagcggaaaggggttagatgtcagttgtggattatttaaatatcctcataacttatttttcataatcgaaaatgtacttgtcttcttcttttttttagaatctgtgtatttattgaaatgtaaacatttattggggggattgaaagacatagaaataaaatgtattcacggtcatcttggtgataacagctaaactactaatttattatccattcatcatcgtctgtgaagtttattgatacacgtatggcaaaaatgtttttaatcggtttatttctcgcatatttataatatatcctaaccagttttcaattggcaagcaaacaaccatagcgaaaattatgcaatctagttggtggctttggctcacgttaaaatcaaaataaactcgtttccgatcatggtttaataaagggattagagggattactatcccgtttaaaataattgtacatatatccctacctgattgaccaactgctgaaatgcgggcgtgtgggtattgatcgctccattgctgtcgagatcggcgtgaagggcgaagtcgcttaaggctttccatggcggttgatatgtctgcacatccaggccctgaagattcagtggggagtcatgccgcaccggggaactggcgatcatggggatgccctgcatggcgccgtagcccagcttgcgaccctcctgtcaggggagaatttcaatgagatatgtatgggcacgtggaatgtggtcttcttaccttctcctgctgcatttgcagcttcatctgaatggtcttcttcttgtccttgcagcgcttgttctggaaccatactcggatgactcgcggcgacaggctcgtcatctccaccagctgctccttcatgagcgcatcaggtcgcggattagcattgtagcaggttctgaaagaagttatttttaaaacatttcctatatatttctaatgtgaaatagaccactcacctgagcgtatgcagctgtttctcattgagcacggtccgaacccgcgtgggcttgccatccgatggccccgagggtcgcttgtccctaatacttttgtgtgagcccgattcgctgccagaatctgcatgggaaatagatagatgggaaacagaaagatactccatcaattcgtttgctatttttggcaaaaaagaagcgctttgaagtgccgttgaggtagattgctcgcttgctcttgttgtcttgcttctattactgtttagttctacctcacttttggccggccgactacaattgcaccaaaaatatggccaattgcgtagaattcggtatggaaagatcaaaggcgcacgcttttccccattgtcatcgatccccggtaattaagtcgtgtttcacaacccccgaaacaaggtgttatctagttttcgatcgtacagatcgatcggtgattttatcgtggcggtatggttcttttgaaggaattttctctcattcttttcttatcgaggcttgcgaattttgcaaaaactattaccaatattgggactactttggggtatacaaatgtgagtaattaccactattggccagaatgtggcagcctattcttgcgcagttacgacgctaatttctctcagtgccgaacttcaaagagtcgcgaccgctgcggtttggcaaacactcgaccagactgcgtgccgttttcgagttgagcacaaacaaacaatccggcaagtggaactatgaatggtgcgctatgccatccactacccgactgcctgattgatcatacgacctgtcgatccctcgatccctcgatcgaagccagtcaaacaaaagtaaaattcccaagaagttgcttgtcaatgtttgcccgcttgaacgcatcgatgcaatgcggactttttgtttgccctggcagctgatttttcaatatacttttccctttatttgaaacccttttgcaaaacaggagggcagggcggcgggtttgccgccacacacgtttggcatccatcgtttgacatcgccgccccatgttgataaggcgactctggctccagctccagctccagcaccagctccaagtaaccattccgtcgattctctccgttctggttaaacaatgagattatgttgacgatatggtttgacaattgtcgtacattgtttgacgtttgccgatttctgtttactctgctatatcacttacaaggatgtaacgctgtctttctaagaacaaaacacgagcacgtcgcttttgtgcgatgccgaactgtttggttatttgtggcccacagtcgcagctccattcacagaaccagaccaatttgggctaattaggattggcaatcttttcggtggaaagcgaatgaagtggaaaaggaagaaaaggggaaatggtgctcggaatgggttgacttttcgcctcgggaaattcaaatggtcgatagtggatgtggcttggggctttgtaagctccataaaaatgagggacagtattgcagatgttgccaatgagaagctttaaatgggtattaactttgataactgggattcaaattctaaggctttggaatttagtaataatggaggatgttatcacatttagtttttcccataactaattatacttattaacgattcgatgcagcaatgctgatgaatgagtcataaagatagccaaatagatggcatgaaaccggaaactaccgagaaaatatttggttacagtgtcaactgaaagggcaaacaatagaagtaacatccccaaaactgaagagccctagatgaagggttgttatgccgagtcaacaaatccagcgagaatccgggccccaatagcaaccccactcgaagctcctcttcgtggtggcgggggctaaaatcaggggccaaatgggacactcacctgacattgaacccaattcgctggaatggttgttattgctaaggttggtgttgttgttgttactactgctaatattgttgttgctctccaccgacgaagaagtgaggctgctctgcgacgatttctccagcacatcgtgatcctccttgcagtacaaagccccggcatcgcgtaacgcgaattcatcgcctaaaattccaggtaaacagtcagttgtttgatgggcaaataagctgtgggggctgggagcgaaggggcaatggggggaaggggtatattaggcaaatattaaactcacctggcagcaattgtcgcgcacacgcggagcatcgaaagcactcgatgtgaaagattttcgttttggcccgcatcacaaaatcatttttgctgaaggagttgccgcatttatcacattttgtaccaaataacctggaaatgataataaataaatattttagaataataagtacatttttattcaagaaaaccagaatcctctttgttttcaatagtattattcaatgggttcaagttttattaaaattattatgtattatagattattaacttggctaatataatgacaatatatggtagtatttcccaaatcgaatgaagatcccatgattggagcttgtaaacagccttgaatgagttcaccaacgacacaatttcaaggggggtggtgggtgttggcagagcttgtttatggctataaaataaaattcttttgtcagtgccgacatcgatgagtgagccgagtgttcatcaatcatccgagcgaacagtgtgtgtgtgtgccggtggaaaagtgttaatttatagctttgcacgtgttaatcaattattcaaagatttgcatggcaaatagttgcgactttggtcgccggtcgccggctttacgatggcaacaaaaaaaaaaaaacaaaaaaacaacaaacgatgcaaacacaccgattttattgcacgtcatacatttagcgatgatgaaactcaaaccccaaatcccagatacccagatacccaattccccgagtctccggctaccgaggaccagctgttgattagaacatagtatttgcctttttgtattggcatcagcgggctaattggctgggctaacaagcctggctaacagaacagcggcctaaacgtttgccgaacgctacaattggaaatgaaaatgaaaaggccaagcgcatgacaccgagtgtgtgcctagggctgagcaaatagctttcgaatgagagttgggccgagtggaaattagataatgccccccgcgggcaatcatcaggggtttagtttcgaattgagatgcggccgtggaaagcggagcagatacagaaccttttagtcataaacacgaactcacctaacataatcacgcttgcagtaggtcttgccatcgcgcacaaaacacgtacagctttcgtccaggaactgcctgcactcctggcacttcagacacgccgcatgccactccagatcgggggcaacgcgcaagatgtactgatcgtggatctggccgccacatccgacgcagtgagataggcgttgtttttctgaaatcgcacaaaaagtataatattagtatctacttggtataagctcgcaaagaaaaatgcaactcaagagattaacttttctttcaataaggaaacacataatatgcaggttaggagtacgagtattatattttaaatgtaggttatatgaaccaaagttttttgatatttccttcacccttcaattaatttacaaactacaataaaattagatacgtatacagaataaatttatattcgccgacgggaaaagcagccttggatgctcaacaacttttccaccatactttaatttgctttgcctagcagtttctatacttatattttttggcacaaacttaaattaattttgccaattatgcctttggaaacgtaaacaaatagcaagtgagacagcaaagacggcgctaattaacaaactgttatcaaataatccgagcttttcctgtttacccaagtgccgcactcccttttttggagtcgagagactgagctgcgatggagaaacttttcctgccacaaaagttttccttttcggatgggtcttcggcgtttttctgggggaaaaacatttgaaaaattcataaatcctggccaagccaactgaaacgcagcagccattttcaagtatttaagttgaacattttcctccacttcgcctcgtgctttatttcttccgttgctttgcttttgcttttcccttccttttttttttttgttggccaaactttgggtggcaagcgaacggaatggggagaaaaaatcaatgcaatcattgccacattatgtacatgctccctcccccccacgactatgtgctgctgtaatccttggcagaggaaaactttttcccggctgctgttgaaaaattaagaaaaactttgacgcgcgtttagcacgttttaaatgtttcgcttccctctccgcctttcccatcacaattcaccccctacacacacacacacacacacacacacacacacacaaaaaaacacacacattggaagaacagaaaaaatcgcaaaaacacacacattcgtgcacagataaaatctgtatctgttgccttgcttgtatctttgtatctttaaacgtggccgcgtatctgagtatttcttttttcttgttttttttttttggggagtggttaggggcaggaagaggggcggctagcagcggaaaggggcggggctggggcccagggtgtatgtgtatatatatctggcgtatctttctttcgcactcgctgtagctacacatgaattatttataaaggcggagcagacaagttgctgctgccgttgttgttcgtgtatattctttccttattttttcgccaatttttgtaggtttatatttttcttatacccttcatagaggcattgcagctgataagcctaggatacaattatattttcaattgatttcatagcaatgtacataaattaatttgcaatgaacaactgaaaatatttgtttcttagttgcagcaatcgagcatttttttatttttaataaatataaaaattattaaaatttactttcagataaagaacaaattaaaataatgatggtttggttattattttgtattattttattttggtatttcaattattcccttaatctgacactttaaagataacattcgggtacataacttccgtacatttttgagggtatttaagagatactttaagtatctggcaaggaaagccatcgtacttggcttgtatttgttgctcttcaagctccaagtgctggggattcggattcagacgggcggactcggacacactgacagctagagggaatgaaagactgacaaacggacggacggacaggcggcatttacttccatgtttcagcctccaattgctgtgggtctttttcttttatttactttttttcttggcttgggggcatgtgcgtctttctcttgttttctttgtgtttttttgccttcaaaatgttgctatataatgctaccctatatggacacatgtgtgtgcgcgcgtgttgttgcacagccaccatttttgccttttttggcagtatcttttgttgtgcgttcccttggacagtgttttggatttttttttcctgctccttcgctgtttgtatgaatttctgacagttatttgtgaatgtgcgtgattttggcatctatgtattgctggctcctgtatttttggtcacagagacagggattggggcttctgttgccttaatgatcctgcgcagttcgttttcatttttcttttgcgcccatacacccatacacccacatggccacacacagatacacgcacgcacacagccgcagccattatggctgtaatgggaatttaaacgcaactcctgcgcctgtgtgctgcttttccgtttgggcgggggtttttccgcttttgtggcgtatcttttgcatgttatgttgccattttgttggcctccccaccacccacaaagtgccacccacgctccccttagttttcctgggggttgacgcgccgtggttcttttattttcctttttttttttggggagatttttcagtgcggcgcacattggaccaaaatgcaattttgtctcgtgttgtcgtctatgaatttttcgactgtgtcggcggtttctctcggtgagtgaaatagctggtggtgcgggttaaggtggggcgctggggggttaatgcgtggtaaaggggctgtgtgtgagtgtgtggcacatgcggcaactgcggctttttcacttttaacgaggaaaacgcttcgcaagctgcgtgtttcccatttttgcctgtcacttctgtttcttcctcattcattcactatttgcccaaatttttggctttttttttgcttttgctatttctgctcgtacctagtctgtatatcttttccatttaaataacgaaacattttccatgactctgtggcagcagcacttgatcttggtgggcatgttcacgtttttatgctgagaggtgttcaagtttttaatggccacacctttttggccattgctcttgacctcggcaacctttgtgtgagttgcatatgatgtattgtaattgcttgtcgatcggaaaaccgtgtttttcattgtcgtgggggttctgtgggaactcagacagttgggctctaactgggttttcttagatttcacggctttaatttgctcgaaatagaatgaaacgatttcttaaaggtttgcaaattgtgaagggtgtacagattcaagagtatcagtcttgaataaaaatataatttaaattccgcctttatagattcccttcaaaaggataaaaggatttcacgaacttagattaaaagtatcgtgaccaattaaatgcatcattgaggcacttttatctaaattacacgagtaaagtttcgtgtctgtgatggactgacagtctgtggactctgatttgaacttgatctattgatctgcgggaaattgatggctgagcaataaacatatcaaggaattcgtgccaagaaacgcccaccaagaagtgaatcgaagattgtggttagtgtttctcggtctcctccttgattctctctctctctctctctcttccttcgtgctacccatctctcttgctggctcctcttatcaatgtcggcaatctttcaaaggccacataaaaggggggctaaaaatgagggaacaagtaaaattgcagtcaaatcaactcgggctacttcacagatacagatacaacagcacgcacgttcacagatacaaatacattgcaatggctgcccagcatcttcttactcttttcgtgcgctgttttttttcttattttccttactgttgctcgacaaggggcaacatgcaaaatgcaaagcatcgataagatacgttttggccaggctctccactcttggccacaaacgcaaatgaggggcgagaaaaaattatggaagctccgccggatatgggcgcgatttcaaaagccactactgtttgtgtcttcgccaagggacggggggccagttgagggttaagggcaccctttgatttatggcatatttgttataaggtaaatacaaagcgcagtcacacagcgagtatcgctttttagtggcacagcaagtgccgcttcttttttcggaccaaactaggaatttcacatgactataaactgagtacaccaagaaaaacggaactccagtttttagattcattcgtgttaaaaacttttgataaaactaaatttttctatgaaaacttaagttatatatatataaagtatttaaaatgtttaatctaatcttgaattttgtactaatttcacagttctttttataaaaataaaccagttatcccacttaaagagcagtttgcaggagagaaacaggctgctcgtggcttctaggaaaatttgtcaattttcctggaagctgttgtgggattcttaaacgagttgatgccgaggtccattcagttcgccagtcctcagtttatatttttgttacctgtggaacgatttaaaaaattaatgatgacaggcggcgaggacgaaacttcggaacacgtgccccaatggatgtttttgtattttttcctttctgttcctccgcttggacaattcgaattcacattttgacagactcatcaattttgtagatacgaggcgagagaaggacagaaaggttgcgagcgttggagaggagtgaagagtgcggcttttggccactgattaggccatgttttgttggccaggctattgtctttcgagtgtgggctgggcaatcactggttttcctctcactccaacgacttcaaaggaagttttgcggtctgtgatttgtttgtccccgagactttgataccttcaattgtgtctgcagttttgggaatttagcatctctggctctgacttaagttggcttaattaagtgcagttgtgcagttgctctgacaatgggactgcattatcttaattcagccgttggcgaaaagtaagtcgggggaaatggtcgaaaaaccccaccgagttatctcgatcgatattttgtatgtatgtatgtatctttctcgttctgtctgggtacgaatttgcctaattaattacacacaacacacaataccataaggggttaacacaagctgagttttgaattttgtttggcaggtcaaaaataagggatacattagatactttaagagtgatttaggagggatgaagtcggtggaactaatgaagcaaatagatttagacttaaccagcaagtaacttaagtagttcgtaagataagcggaattggcttagaggaatggagatactttaagtagatttaagctgttactcaaagccagaaatgcaagactattgcatcttaatagatgtgcacttgtgtttgagttgagaaagaggtatgcatatcataccttagataaatatattgtttttgatgatttatctcattaatattctataaccaactaagctgcactttcgtgtcacgctgccatctcgaatgctggcatgtgtaacccagcaagcgcagccaataactgatcaatgcaaactgactcttctgctcaaatatgcatataaaaaagaatcaacaatgggggaacaaggggctctgaaaaaacacacatccaaaagaagccgccgccaggcaatcactttgaagtgtttgattttcgaattggccgtcgcagttaactgaatacgtctgttgtgggctcttcttgttgttgctgcggctgctgctgctgctgctgctgctgctgcggcggatactgatgctgctgctattggcgatggcgatggctatggtgttggctgtcgttttattgaagccaaatttgaatactcgaccggggagatgccatcggccggctgctgaaggcgcgacatcaaagagtgcctggactcaaaatggacatgggcctgcaacaatttatgccacatccccactccggcgagcgggacggcgcgatgttgctgctgcggtgaccgtcgatgttgctgttgctgctgctgctgtgtgcttgttgcatgttgcaagctggctgagtgaagaacggaaatgaccttttttgtgtgtcggcggctgaaaacaaaatgccgatgtgcccgagaatcaaggcttgaatcttcgttctcttcagagagcactcaaaaaaacaagtatgcatatgcagcaaacattggatttatatgtgtgcatcgttcttcaaaaataatatcaaacattaaagaggaaagctgatttgcttgaatagattgaaaacaggcaattgagaaattatatttgaaagctagttataaaatgaagtgaagtttttaaatatattatgaatcctttcaaggcagcctttcttttttctccagatatatgagttacttagacaaatttaattcatccgtaattgttaattgttttttttccgagtgcatttctcggttttccccatctccctgcccctcagtgccgcatgtcgccgacagatgacaagaaccgatagtgtctttttttttcattcgagcccgactgcagccagaatcgcagcgtctggggcttctctttggctctgtttgggcccggttaagtgatgatcatgatgggttattaggcaggttgcgttgacaacgcatttgtcttgcgatggggacgccgacgcaggattctcggccagagcgataagcgggcgacatttatttatggtgttttaacacaaggcgcccctcgcacaacaaagtaaagtgaaaaataaaataaaatcaaaggttgaaaacaaccgcacctcagtcactggcactggagaaagccaagtcgagccgtcatttcaaagtgtcaaattaatgtcagtaatgaacaaaaatctactcaaaaatctgactttgattcgactgcaattaaagtgagccgcacacaaagaaaaattatcggtaaaaaggcaaacaaaccaggggggtgggggtggtggaactccgtttcccaatgcagtttagcctttttgggacaaaacgggtttgtggtaacaaattgtttaatgcatttgattgttgctttttcccagtgaccattttagtttttttttttacccagctgcgttttgcatgttttgcgcataattttatttgcattttttccacattcccattccgatttgcatatccatattttgccattttaatttgtctaattttttatggctttcggtttatcataaattgctttcggcttttggctaattagaatgtgtgcaatttgaccacatttttgcattgctgtcgctgttgttggcccactcttgttgtgctgcctttgcttgttgtctcttctcggctgttttgtgtaaatatttgacctgatgcgtgtgaactttaacagttcttatgctttatttgtcgcaaatattgcgcaaacacgacaacaccaaagggtgcacctctgcccctcacgccgcaactccaccacctcccttcttataagccgaactccttggccggacattctggccttgtttgccttctggccaggttgtgtgttcattcttttttttttttttttttggttgttactgcgactgcgtgccccttttgcacttgaacattgtcgctggctgtagttgttcttgtacttgttggaggtgttgttctggcatttgtacctgattcagatccaactattttttttatggcattcaacataaataaagccgcagttttgcactattttcagcttgtggaaagtctagtgaggcattgccttatacaaattaaaacggcagacgcactatgattatattggcttaaaagtatataaatgcgttgaagatatttcaggaaaatacctaatccttttggcaccctactaccatgccatgccctttttgaaaattcctgctccaatctcccgcatttgaggtgtggccaagtcaggatcggaatcaaagccaccttggcagcatgcgcgcctaggtggatgcagcaactccaactccgttataaaaacttaagacctcattaaaagacaccgcctgctttatggcactcgaagaccgagttgcccatttaacgcgttgccggcaagacacccccccccctccctgattatcgccaccaaatggctggggtcctgttgccatagagtatttaaaaccccggccgattacgcacacgcaactccacaccaataagaagaaaaaaatgagatgaaaataagaggtaaatatcgaagaccgccgaccgccaaaggctttgggcccgtgttcatgcaaatttttaacttcatttcggcttcgttttgttaattaatttatattattttatttgggtgtcgtatacgcagacacacacacacacacacagcctgcatctctcgactgagttcacagtttctcagtttctgtctctgtgttccagttggaggagagtctcgaacgacaaatttatatttaatgagcttcataaaatttgaatttcaaaggatccttgcaccgcagcggcatgtttcgataccacagatcagagaacgacagacccaaagagccgaagagctctgcgatcaactcggactgcaatcaacgcgatggcaggctgtggatgtggcggcttggggggattccgagtccgattcggatacgagtacgattctggatgtgaatctgaatccgattccgattcctgccgatctggctgcgttccaataaattgctctgttttatggcaatttaagtaggctgctttatggccctccaacccgtcgctcttccctctcacattccccgactatcccgcctagttgcgaatcgggttcggattctcgcttctcggatctcagatctcgatctccatctccatcttcacctccatcgggtaaaccgcatgattcacttgctgatctgtgtggtcggccggggaagatgtattacgtggtctacccacttttaggcggcgacaaaacgctcgccgccaacttcctcataaattaaagaaaaatacaaattcgaaaaaaggcgggcagtcgctggaagatctgcaaactcctcaacttgtttggtcggttttcagctcgccttgtaggcaacaattcaatttgacataatgagctacattttgtttacaacggcaaacgcatggctgccagttgtttctctttgtagtgggaggaattaagatatgaatttcataggtccatgtacaatggcttgaaggttagctatgctgattcgaagacgaatcacttaactgtcattggatcttagtaatccctggaaagcgaattcgtctaaagaaaatgtatcttattcaactttagtggttttaggcagctagaatgcttcccactcgcgaaacaacttttggtgtgatccaatttggggagcattatgacttcctatgattcgtggcagaccgagaaatcaacggtgttttggacataaaccagaggcagcaacttgtttggcctgtttcccagccacatcccctcctctgcccgcaggtgaatgcctctctttccgtctggccgtgtggcaacatttcaatttgacataatgagccgcaagcccgggttgcaggtagagatgtttgagctggcttagtggttgcgaccattaccatccgtcgggatatgctatcccgtcaaaatattgtcaggtaactaacggcaattgcggctaccgactggcgacgtgtctgcccaaagtcgcgatccctaatatccatatgtatatatggtatatatatataataaccgaaccgaacgagtcgctgaatgagtcgccccgtggcgcgacaatcgaaattggtctcgcctttcgagaccggggttttgggttcagttcatcagtctggtcctcggcgggcggtccaacctgttgaacactccacttgacattgagtggagtggttctaagcgggccaacaagatggatctggtgcacccctgagtgtaatgggatatggccactgttgcacttcaattcgatctcgattttttggtcggattgtgcaatctgctcaagtggcgtctggcctgtgtgattggattctccctcttggattccagctgacgccagcggcaagtatttgaagtcctcatcctcactttatggatctcgcataaaagtttgtttttctaggcagcccgtggttgtatctgtttttttaggggtcctacctaggctcttttattgtctttcatgcttaattagtcattaaaacaagggttataaaagtgacactcataaagccagcgactagagtgggtatgggccagaataaagctttaaaaacgacgccattaaagtggccaccgcatggcatgcaacacgccaaaatgccacacgggagcttgggtatatcccggttgcacctgaacggggcatacatatatgtgggcttgcatgtgtactggtattacgtatgtatgtatgtatttggccaggtgtcatatggcgctgcgggtgctccatcgaaaatcccagcgggaaatgcaaaacgctcgccactcttaatgagcgcctggagagaggcacgagtttcccccattttccctttcgcctttccctcgatttcccgcgccctggagctctggggctcctcctgttttccaagtcctcacgcgataaacgggcgtggccgtcagttgttcccttattttgtggcctggttaactcccgactaatttctggcctgcacatttatcagttctccgcttctctggtttctccctcatggcttctcgcggcgatttccccagctgaaatttaatatttttctacagccgagcaaacagtagccgcctctcaccttgacaagctgctgacaccttgaatgaacttttcaaaaatgcgagagggaaaaaggcacggagaattaaaaaaaaaatttaattgcactttaatagtcaggcggctgctttaatatgcccaattccagcaggcgagggctttaagaatatcttgaattgcattaattaggttagagagcttcgacggaatcactgggctttaaaaacattttagctcgaaaataacatggaatatggaatatttagccttttttcgagtcagtactttaatcaggtcgaggctgtgcaatcacatcgatacttaaagttagcagcatccacttgacttaaagtgctcgtaaaacttaaagtttaaggctttgctttttgagggcaaactaaataaatggtgttgaatgtaaagtaatattctacagttttacttaatatataatgtgtactttgaattgtaattgccattcctgcagtgatgcaattttcaagcacccactatttctgcccatcttcatgatcatctaagcctctttctaagctaatcagttaatcagacaactgtttttatgtggcgaacggaaattccaggcataattccctaatttctcgacccagcgagctgttaattaatgcaaagcagccaagactctgaggtgaattgagagaatacctggacgcaggaggctgagagttgttttgatggctgccaactgtcttctagacctgattttttttttggcacatcgggcacagatttcaaatgatgtcagggaatatcgagggcgagggggaactggactggtgacactgggcgcaggcgcactgctgtcttgggtccgaatctcaggtatgggccaagccaaaactccggccaacataacatattgatctagtgccgggtaccgaagtgcaaaatcagataagctttgggatttacgtttctgtctgcgctgcctttttgggcctttgggttcaggtcgggaatttatggattgcgcctaaataactttatcacaccccaagcagcagcagcagggattccgaaataaaaatcacaccggaaacgggaaggcaagcaaaaaatgtcagccagggacaacaggaatttggataggaactcgtaaaatatagataacgtctgtctgcctttttcgaactaatgggtgtggctccctcctgacgtcaccactgtcgtattgtttttgtgttgttatgcacttaaagttaggccaaaaaatgatatgaaagaataacaaacctagcgctatgactattcaagcaaatattcaatcaatttccaaccttaacccagtgaatcttccaatacgaaactatcaaaaacaacaaaaaactccaaacgaaatcgatcgaagcatgtttagaatggtaatatagttaattttatggcactctaaatcgaatcgcgttgcgtatacgaaacatcttttcctttcactgacgtttcagcagctctataaataaccaagagatctgagatcggtgatctatggctaaataaccagcctcatctgaaaactcggttccattctctttcgttcgcagacgacttaaccttatatggccgacgattgacactttacaaattattcgaaaaattatttcaactttttgtgcattggctaaacatttgcccaatccatttttcacaattaactttcgaaaggttttgtgtttattcatcgaaaatgccaattagcattcggtgaatttgctggcgagaaatttaaatggaattaatatgaattagattagggaacatgtgtacgacgagtaaggggaaaatccgtgccacccccgcttcgcattttattcaaatttttggctaattggttaactataaaaataaaaatcgcttggcttttatggccgcaaataattgtcaatttttgatggtcttcaacataaagtggtacaattttatggcagccgccaacatgaaaaaccgaaactagttcaacgccctgatgtatgcagcgatctcggacttacataattttctatagagcacggagagtaaacaaaggctcttcagatacttcagatggcgatttctttttgtttttactatatttaattaatttaacgactacttgagaagttgccaacgacatgttgactggaggcctgggtctgtgacatggaaaactcattaaaatgtttacagcgctcaaaaatcaacaaacaaacaaaactcgcctcggaaccaagcgaactaacaaaagagagtggagctggctgatactagaggggggggggacgaaacgaaaactacaaaaattgttttcatttcaaatatcaacttgaagctggaaaactctaacttaaagttttgtcagccgccaactaactcacagagcaactaagcagagcgatggggaggaaactttgtgaaaagttttcaaattaaaatgttcggacattaaatatttaccagcgctccatggccgacaactaatttgaatttaaattacaattactaaaattcaatgcaatttaaatgattcgcagctacaactgcatgtgctgcattattccagcctcatatataattcaatttccccgaacccattgtatgtagtatatgtgcttatgattatgatttttcatgttttcctttttttttcggaatttttgtttggcttttttgtgttctgcggtcgttcgtttggttagacaactgtcagccaaaacatttgtcacaatttagcatacgaaataaaatttgaataaaatatattcctctttctgtcacacacggatggcattttttaatgacactcttggtttatgaattcataaaatgcattttggttaacaaactttaggctagttaaaaatttgtcacattatcgcatgagatacatttgtgatacatttccagctcttttcagcttttttcatgcaattgcttgcccgctttgcttgcgcgcttaattgctcagcattaaaatgtcattcaaccgttaattggcttctatataatatgtaaagtgtgcttaaaataaaatacggctataatttaacagttattgccgtactgaaacaacaagtgacaggtcgagatagggtctaagcccattacaaaagctgcagcgacaagtcggctaacgactgtggcccgaaagaaatcccgaacctaaagatagaacctcagaaagtcgttcaatatacaaaaaaaaagatcctccaatttgacaaaagaatggcacaataaaaattatttatggattcgtattttcttggtatcactttaatttgtttgtaattactttagcgcagccttgctcacatcacatccattggcaaaattaaaaactcaaggtatgaaagagttcaacgcgtgcctgaactttttaatgattttggtataaaaataacttcgaccttcgttacaaataaacttgactaacagttcatggttttaaagctcggaacctttgagtccgagccttgatctctgatatctggaatttaaaatggtgggcattaaaatgtttcaaaaataagcaagacaagtttacaactgtgatttgggtgcgagcatttgttaacacggctttttacttattttattggcttttaatgtccaaagcgggctttcctcgttcattttccatatttacgaatcgagaaagttacccatcagtggctcttgtttaatgactatttaatttgccaatttttgtttggggactaggacaatagccataaataagtcattaactgctttaaatagctttattagcggcaaatgattcgacactgatgcgtgatctatgtaatgatgtttcaattgcaggtatacaatttctgaataggttgatttaaaatgcaatttaatcttggtttacagtggatcaacaaagcgcttttttagactaaacccctattagcctctaagttatttgtcaggacatttatttaaatccaaattttaaatctaagggaactaaggaaaaaaactgtaatgccttcttaaacagaccgaaagtacttagaaccaacaaatgtatctagaagatacaatagcctcatatccaaactgtggaagggcattccattgttctttttttaagactgtccctaggtaagtgatcgtgctatctccagtattaaatatcgtccttttcaaggatgcagcccaaatagcccgaaatcggaaagccagcagcccttgaatatcggtactcacttatcacatcgtgtccatggcaatccaaatccaggtgatggttcatcaccagcgatggctgtaatccagtttgattgtggttgtgattgtgcaacggtagctggtgagccaaatggccaccaatctctgccattaccatatatttggctgacaggacactcggcgaagcacactcgagatatttgtgggctgggaatcttgagagcgggcgccttttcgttttgggccgtactcaagaagtttccggcattgagcagggatatttgtgtaaggcacttgtactggtttacttattccgtgaagtttgcttgaattactcaatatgagaccgggacacagagcactgggttttcggcgaatttagcgggattatcacggctgtgtgatccgtgtgcgcacacgcgttttgttcgcagggatttggatctatggtgagggatttaagagtctctcgcatccgaaaaggcaaatccgacggctatcgagctaagacggtcgatgttcgcgatacgacggctatatagtagcgatgacgacaaccgaccaacgacgatgtctggcgcacaaacatgctcactgcacggagactgctgaacgactaaaccggtcggcgcttcgttccgtttgccgtacgttatccgcacgccagggagccagcgagctagcgagccagccagccactcaccccgaaatgtatctcgcagatacattctgcctgcgagagcagtgcgactagctcgtcgctccgcaagggtagggaactggtgtggcactggtgcagctgcaaccggttccgagccagttctgcgtgtacttctcggatagccgatagcggatagccgactcgatggactgacggcctgcaggggggggggagttcgaaacaggaacaggtgtttttgtcgcactcgctctgcgggcagcgctctcacgctccgtccttttctggcagcaagcccatctctttcgcttccacttggtgggccttttctaaatggcggcgaagcgggccaatcggttggacggagtgcgcatgaccgactccagctgtggctgcgggatccacaatccacaaatggaggcagtcaggaggtgggcccacatcctcgctcccttcgctggccttttgttttgccaatttcgcttttggttttcgaagtttgtactacaaaatggttgcacttgtaagcaagcgcacccccctggccaaccctaccccactcttcatccgtcgtctgtctttctacccccgaactgttgtaatgcgcttgtcgaacttttcggctgtagcccctccgcttttggggctccccttttcgcccctttccgccccccttgtctcacctgcccgtcttgacttggctctgcggtctgaaggcgtctcgtttcgggtgtgctgcaacatcataataattattgatcttttgatttcgtcttctggtcttttggggagcgctccaatctccaccccctccccccctgttgctctgttgctccttcaaggccctgttgcaattttaatgacgcccccgtacggcaatttatatatgtgttcgagtgggtggcggtcggtgtctgtgttgcggttag

SEQ ID NO: 42695 - DNA, 3228 bp, DROSOPHILA
cagtctccgtgcagtgagcatgtttgtgcgccagacatcgtcgttggtcggttgtcgtcatcgctactatatagccgtcgtatcgcgaacatcgaccgtcttagctcgatagccgtcggatttgccttttcggatgcgagagactcttaaatccctcaccatagatccaaatccctgcgaacaaaacgcgtgtgcgcacacggatcacacagccgtgataatcccgctaaattcgccgaaaacccagtgctctgtgtcccggtctcatattgagtaattcaagcaaacttcacggaataagtaaaccagtacaagtgccttacacaaatatccctgctcaatgccggaaacttcttgagtacggcccaaaacgaaaaggcgcccgctctcaagattcccagcccacaaatatctcgagtgtgcttcgccgagtgtcctgtcagccaaatatatggtaatggcagagattggtggccatttggctcaccagctaccgttgcacaatcacaaccacaatcaaactggattacagccatcgctggtgatgaaccatcacctggatttggattgccatggacacgatgtgataaaaaaacaacgcctatctcactgcgtcggatgtggcggccagatccacgatcagtacatcttgcgcgttgcccccgatctggagtggcatgcggcgtgtctgaagtgccaggagtgcaggcagttcctggacgaaagctgtacgtgttttgtgcgcgatggcaagacctactgcaagcgtgattatgttaggttatttggtacaaaatgtgataaatgcggcaactccttcagcaaaaatgattttgtgatgcgggccaaaacgaaaatctttcacatcgagtgctttcgatgctccgcgtgtgcgcgacaattgctgccaggcgatgaattcgcgttacgcgatgccggggctttgtactgcaaggaggatcacgatgtgctggagaaatcgtcgcagagcagcctcacttcttcgtcggtggagagcaacaacaatattagcagtagtaacaacaacaacaccaaccttagcaataacaaccattccagcgaattgggttcaatgtcagattctggcagcgaatcgggctcacacaaaagtattagggacaagcgaccctcggggccatcggatggcaagcccacgcgggttcggaccgtgctcaatgagaaacagctgcatacgctcagaacctgctacaatgctaatccgcgacctgatgcgctcatgaaggagcagctggtggagatgacgagcctgtcgccgcgagtcatccgagtatggttccagaacaagcgctgcaaggacaagaagaagaccattcagatgaagctgcaaatgcagcaggagaaggagggtcgcaagctgggctacggcgccatgcagggcatccccatgatcgccagttccccggtgcggcatgactccccactgaatcttcagggcctggatgtgcagacatatcaaccgccatggaaagccttaagcgacttcgcccttcacgccgatctcgacagcaatggagcgatcaatacccacacgcccgcatttcagcagttggtcaatcagatgcacggctacgacctgaacgggatgcccattctgccgccgcatccgcactcgcatccggcgcaaggacctccccaccagcaccccccgccccccggcggaccgcacaaccatcagaaccagcagccgaaccagcagcccggaggcagcagtttggactccgggatcacctcgcaccaccatccggacagcaccgactcctacgtcacctacctggagagcgatgacaaatccaagctggcgctgaccccgtcgtcctcttcctcggcctcggcgggcacatcgatctcctcgccgccatcgggcgtcggagcagggggtggcggtgccgtgggcggtggttcaggtgtcctgggcttgggcgtggtggccaatcagtcggccaccgagcagctcatgcaaatgctccagaaggtaacgggctcggcttccccggcctcacatgcggttctctaaaaacaaagggcgcgcagagggcgtggcaggaagctcgaacgtgaggagctgcagtcgatcttcataaactcgaaaagttgtcttgcaaaatattgacacccgtgctgaaattctggtgtacaattgaatacttctttaaatacccaaatcatttgtactttattcaataattttatcaaaaagtgttcccattttacttcaaaacgattcgaagtttcatcaatagttttatccagtaagtggagttcgactgtattcggggttgtgcaattctttctgtccgcattttcatattctactcatgtgtattctgtacatttaattttattctgtttgattcggtgccaaaaaatagtctgtaggccgttggcattttgtggataatctggctctggttcgttatgtaacatacacttttgttgttgagttcgaagaaaaaaagatcatgaaaaaattaatgtaagctaaacaaaaatgctcacacacttgaaaagttattacaataatttcagacacgaaaacaaaaattatgataacaaaaggaaaacagttacttcgcatcaagtagggaatttcattaaacataaatttgtaaataccttttatatattaataataaacaaatatattttcattcaaaatgcaaaagaaccgatcgaaagaaagcattcaaaaacgaaaagagaatctgactcgtgtgtattatatggtatttgggatgtcaaatccgaggcgtagctataaactataaaggcgcacttggcaaacttgtaaatcgaattagcaacaacaaaagcatctacgttaagttcataaattgtatggcaaaagaaacacaaaattattataaataaataaatgcagaaaagcggacgggaattttatgtaagcgagaaacaaaaactgtaactaaatctagacttatttgttagtttttaaacatttccgaaatgcattagaagacgagggagacaacaaatccggcagcggaaaggcagaaagaaatgacgaagtgtaccaaggatgtttatgaactgtttcgtaaaacaactaatgtattttcaataatatttaactaatattaataataaacagtgcataagtaattttagtaactatagaaaatgtttaaatgaaattacaaacgaaaataaaaccacaaaaaaacaaga

SEQ ID NO: 42696 - protein, 534 aa, DROSOPHILA
MVMAEIGGHLAHQLPLHNHNHNQTGLQPSLVMNHHLDLDCHGHDVIKKQRLSHCVGCGGQIHDQYILRVAPDLEWHAACLKCQECRQFLDESCTCFVRDGKTYCKRDYVRLFGTKCDKCGNSFSKNDFVMRAKTKIFHIECFRCSACARQLLPGDEFALRDAGALYCKEDHDVLEKSSQSSLTSSSVESNNNISSSNNNNTNLSNNNHSSELGSMSDSGSESGSHKSIRDKRPSGPSDGKPTRVRTVLNEKQLHTLRTCYNANPRPDALMKEQLVEMTSLSPRVIRVWFQNKRCKDKKKTIQMKLQMQQEKEGRKLGYGAMQGIPMIASSPVRHDSPLNLQGLDVQTYQPPWKALSDFALHADLDSNGAINTHTPAFQQLVNQMHGYDLNGMPILPPHPHSHPAQGPPHQHPPPPGGPHNHQNQQPNQQPGGSSLDSGITSHHHPDSTDSYVTYLESDDKSKLALTPSSSSSASAGTSISSPPSGVGAGGGGAVGGGSGVLGLGVVANQSATEQLMQMLQKVTGSASPASHAVL

SEQ ID NO: 42697 - DNA, 4472 bp, DROSOPHILA
cagacggcccagttgggcaattttgaaaaccataaagtgcgctttcaaaacggcaaaaatataggagagctatgtaagtggagctaagcgtgtggagatccacaaccacgctcgacagtatgattccgaattacacttttgccacttttaattgttgccactgcaactgctgacgatggctggccgtttctaatcgtactcatactgcttctgctgttgcgccaacagttgccaaaaatgtggccaaaacgactacggcccaaagattatgattataatccgcatttattcctaaatttagttcgttttgcacatacgtttgccgtgaaaattgcggcatgcaagccagtgatgcgataaacacggcgtctagcccattaaattccacgcttatcatgtgaacagcaccgataattattgaattaaaactaattgatggactacaagccgctcctgacccaacttgaatctaaactagcaatttaacaatggagctcagaaaaaaaagttcataacacacattaaagtaattgagaaacagttctctatttgagtttgctaaaccaaaatatattatagttgacaatattctagattttatattgtatatgcagaatatatatatatattaatacttaagatgcaaataaattcgaatgaattcgaaatttaaaatgaaataaactccgcctgtttctattctattaaccccccattaaaccttcgagtttcactacacatttatttagtttgcatcttgggtttacattaaaagctctacgcgtgtacaaaatcgataagtatttgcaggcttctatgtgccccagaatgtctccattatgccccacgaggctcgctcgtcgcaggtataaaatatataatttgcgttataattgctctgtgatattgctggttgcacagtgcggagggggcaaggggcggtaggtggcttcttggcattcgcttttctggtacaaaaatccatcagcttcgcagcaacttacttgagctgcaccagcaccataaagtaggtgacgacggcacccagaacctgcgaatcgggaatatccgattcagttttaactccatcaatagatcaataaatcaaatgcaacaaaccgaagcaaacaaatccagggagacggtgaagaatttcgctcccgatatgctcatcgccttctggcactgctggcacacgatctggacgaaggtcttggcctcctcggagccatcgtaccagtggcacgagtaggcggcctccatgacggatgaactctgcgaaatgaaagtcgtattaaggatgctctagataactaactacacaaactataactataacaacgtttagaactatgtatgtttcccaatctataaacttgaaaacattggttcaattttatctcatacgcaaaaacacccttttatttctaccacatggaaaaaacacactggttagcttgtagtgaacggaccaatctgttgactctcaacttacaattcatttagttttaatgaagtctcaaaattttttataaatatccctataactcaaataaggatgttctcgattattaatcagttgagactgatgtctgatttacttataaatttatcttgcaaccctgcacaaactcacctcttcaatcagacgattgccaaagatgcaaaagtggaacacctgggccagcgcgtatcctaggtatccgacgactgtgaaggcgtagacattcactccgttgattttggtggcctggtatgccagcagggtcagcttgatggtcgaggtcagcatgtggaggaggagggcggctccgtaagtatcgccgatggcagccaccagtctgtggggaaaaggcaacgggggaaaggatgagggattgcaggcaggaatcaagtcaatattggtatcaacaactgcacacgccaactgtcggacaggacaaacaaggacattcctctagggcccccaacaatgattgcaattgaggaagtaatcaagtaagtcaaacaagctgcagggatctgttgagctcctaataaatgagaacacatgttccgatggcgcctattgaagttttacaaaactgaggggaaagtgtgtgtgtttattatgttcggtgctctgttaaaggcaaaaatccaagtccatgaaatatgagtggactgctctgccatttaaatcgccaaaaatccaatcatcactggccaaagcccccttgaaatggctggtccaatttggccaggatttgaactcaccgcaccacgtgcttgtgccgctcgacccagtacttgatggcactgcgcaccatcatctcctgctttttggtcagcccgttgggattagcgccgttcaccaacccgttgcctccgcccccgttcccgccaaaggactgcagtgtcgagggtgctcgaaactgagcgccccaatccgctttcgagctgtagatgcccgacatgtccatgtcggtgccgggatccttttctgcaatggaaaaacagctcgtcatggcattttcctattcagtgaagtgctcactgaataaccgcctaaaagtttaggttcagactcaacaaatcaccttcattatgaattagctccgacttggagttggccgacagggacctgaagagggccgccgagttgggcctgtaggtgtccagcgaggcggacagctccatcagcggcttcatgatgcccttcaagtgctgcagctgctcgcaggcgaatatcagccaagagcagaacatcacgtcgcatagattggagtggatcatcgagaagagcacgtagtagatctgaaaggcaaagctgatcatgtagaacatgccgtggctggcgttccacgggtagaaggacttaatcggcagccggggtatctccaccgggatgctggagttcgtctcatggtccaccaccatttttacgctgtcgccaaagaaggtgatcgtggtccaggcggtggccgaggcgactgtggtcagcatcaccagaaagaacagcttcctcatcttcgccagtgcgatcgaatggtaacgagcatccgactcggcgaacaagggatgcgtgttcacctggttccatatattcaatgttctgccggaaaaacataaaattttaaattccccaagtgttcgtaagctcggtgcggtgagcagaggctcacctgtagaaattcttctggttaacagccaggtagataaacttcgtgatgcagtgggtgaagaagagggtcgtgatcgtgttgcccgacagctcgttgacctcctcggcgttcagggccatgttgaccaggatgaaggtgaactgcatgaggaggaacaccaggtgcacggaggagtacaccttcttcatgaaggcactgccgcccgtgaagttgtgcatgaacaggccggagtacttcatcgcccggatgttgggcatcaggtcggcgaccaggcccgtgtacttgctcggctgcatcgaggttgtcatcctgttgagcggcggaaattgcacgacaaaattaataggtttcgccaacacaatcagctattatgaacgtaatctgttcaatattccgtatttgtgattagtccttggtttgcttgccgagtagaaaaggaattttcctgcccgaaatgaatcgatttggaatgttttattcatagcgggataatgtataatgcatattgaatattcaggtggactcatgtcctctcaaattaatattaatttggctatcgatcgtgagttattaaattcggaatgtggaacaattgtgtacgatatatggttctctaattggtaatattgtaatattgaaagacccagtgctattaccttgctattgaactttaaaaatacaaatgtaattgttgtctggtacacttgggttaattgagtgccagtaatgcagcaatcatctaggcaatcatttcactctttaaggcttaaccgggatactttaagatacgagatatgaggctttccggaaccaggacacagttgacctgccagcaccgcgatgtcgacggtaatgaaatgtgaaatccggaaggttaaaaagctctgtcgacaagtgcctgctccttctgtcggctaggtacttgctccgctgtacataaggacgtgtactttgaggacgagttcccacggctgcaacaaggccacattaaatcctagcccgcgactttcactccgacccacacatggtaatgaaaatatacaatatgggtatcgggccgccttggagcgcttaaaaattcagctcttcagccacgtccatcgatgtgatgggtgcgtggcagacgcagaattcccacaattaaatcgaacgcccacgaacttgtccaccactgctgtcgtctccgggtctaggactccgcttttgggccatgggccatggcccagtcctgtgccctccacgcggcgtatgcgcactggcggaatggcactgggactggagatgggctcatccttgcgcggcatctgc

SEQ ID NO: 42698 - DNA, 1386 bp, DROSOPHILA
atgacaacctcgatgcagccgagcaagtacacgggcctggtcgccgacctgatgcccaacatccgggcgatgaagtactccggcctgttcatgcacaacttcacgggcggcagtgccttcatgaagaaggtgtactcctccgtgcacctggtgttcctcctcatgcagttcaccttcatcctggtcaacatggccctgaacgccgaggaggtcaacgagctgtcgggcaacacgatcacgaccctcttcttcacccactgcatcacgaagtttatctacctggctgttaaccagaagaatttctacagaacattgaatatatggaaccaggtgaacacgcatcccttgttcgccgagtcggatgctcgttaccattcgatcgcactggcgaagatgaggaagctgttctttctggtgatgctgaccacagtcgcctcggccaccgcctggaccacgatcaccttctttggcgacagcgtaaaaatggtggtggaccatgagacgaactccagcatcccggtggagataccccggctgccgattaagtccttctacccgtggaacgccagccacggcatgttctacatgatcagctttgcctttcagatctactacctgcagcacttgaagggcatcatgaagccgctgatggagctgtccgcctcgctggacacctacaggcccaactcggcggccctcttcaggtccctgtcggccaactccaagtcggagctaattcataatgaagaaaaggatcccggcaccgacatggacatgtcgggcatctacagctcgaaagcggattggggcgctcagtttcgagcaccctcgacactgcagtcctttggcgggaacgggggcggaggcaacgggttggtgaacggcgctaatcccaacgggctgaccaaaaagcaggagatgatggtgcgcagtgccatcaagtactgggtcgagcggcacaagcacgtggtgcgactggtggctgccatcggcgatacttacggagccgccctcctcctccacatgctgacctcgaccatcaagctgaccctgctggcataccaggccaccaaaatcaacggagtgaatgtctacgccttcacagtcgtcggatacctaggatacgcgctggcccaggtgttccacttttgcatctttggcaatcgtctgattgaagagagttcatccgtcatggaggccgcctactcgtgccactggtacgatggctccgaggaggccaagaccttcgtccagatcgtgtgccagcagtgccagaaggcgatgagcatatcgggagcgaaattcttcaccgtctccctggatttgtttgcttcggttctgggtgccgtcgtcacctactttatggtgctggtgcagctcaagtaa

SEQ ID NO: 42699 - protein, 461 aa, DROSOPHILA
MTTSMQPSKYTGLVADLMPNIRAMKYSGLFMHNFTGGSAFMKKVYSSVHLVFLLMQFTFILVNMALNAEEVNELSGNTITTLFFTHCITKFIYLAVNQKNFYRTLNIWNQVNTHPLFAESDARYHSIALAKMRKLFFLVMLTTVASATAWTTITFFGDSVKMVVDHETNSSIPVEIPRLPIKSFYPWNASHGMFYMISFAFQIYYLQHLKGIMKPLMELSASLDTYRPNSAALFRSLSANSKSELIHNEEKDPGTDMDMSGIYSSKADWGAQFRAPSTLQSFGGNGGGGNGLVNGANPNGLTKKQEMMVRSAIKYWVERHKHVVRLVAAIGDTYGAALLLHMLTSTIKLTLLAYQATKINGVNVYAFTVVGYLGYALAQVFHFCIFGNRLIEESSSVMEAAYSCHWYDGSEEAKTFVQIVCQQCQKAMSISGAKFFTVSLDLFASVLGAVVTYFMVLVQLK

SEQ ID NO: 42700 - DNA, 4482 bp, DROSOPHILA
tctgcaactacggactggagcactggggctcagacaccaagggcgtggagaccactcgccgattcctcctcgaatggcagtccttcttgtaccgatacatacccgaggctttgcagaccgcaccgccgcaaaagatcaacgctcgaccgcaaaagtaccgcggacgcgacgaaatggagacccttatgagttccggcaacgcagctgactgggtaaagcttagtgaatcgctgctgggtcgagtgcccgaaggcttcacctttgtacccaagcacaaggcgaatgccttctaggtttctttcgtgtgtaaatttgtatttttgaatttatgcgtagtctgacataattaaatttataatttaaatgaaatgaacagcttgtttaagatataataatataacatatatatatagatatatatatgttatataagtatatattacatatgtatatatgttaagccattcttttaattcgttaatcttaaacatatatatatatgttatataagtacatattacatatgtatatatgttaagccattcttttaattcgttaatctcacgattggaatggatgtatagtaatctcttcgctggtacctaaacaactcaaaaatatgtttccataatacttgacttgtccaattcttgcttactataagatgaacaaataccagttgttcaatggttgcaacaccaatcttctctcctctagctttaaaatgtattatttaattgggccgaaatcccgccggcactgtaataccgggccacaggcggagtaagcacctagcactccgtctgatttcagaaatcagttcctccaatggaggaactaccagaggttaagccactctggaatgcagctagaactagttgagaattattcaggccaattagaaatggttttgtcaatttttttgagcataagtctttgggcagaacggctgaaggacttgcatttcttagtaaaaaatataattgatctttattgatacgttactgtagtcacaacaatcactttaagtagctaagtgcctcctccacgtcggacttggatcctaggaatatgggactgcgctcgtggatcttcttgggcacaatgtccaaaatgctgatctttccgtcgctggccagacctccagcctggatcatcagataggccatgggcacgcactcgtacagcagacgaagttttccgctgggagcggactttgttgccggatagataaagatgccgccgtatttaatggtgcgatgcacatccgcgaccatggaacccacgtaccgcgctccatagggctttcccttggcgggatccttcttggccgcaatgtagttgaagacaccatcctcccaatccgctgcatatccctcgttgatagagtatatctttcccttctccggcacccgcatgttgggatcggtcagcacgaactctccgatggccgggtcataagtgaagccattcactcccgaacccagacccaggacaattgctgtggccgaaccgtatagcgcgtagccggcggccaccagctgatttccgggctgcagtgcatcctccactgtgggcggaccatcgcttttcttgcggtaaatggcgaagattgaaccgatcgacaccaggcagtctatgttggaggatccatccaagggatcgaagcacacgatgtatttgccctggaggtggaagagcgaataaattatagggaaacgtcattaaatgtggctagaagatatagggttagatcttagagatagagccatcttaactgacagctaaaagctaattcacaccctcataccaaatttcgtaacaattggtcacgtattaaggcttaaagactctaatatatccctacctgtttctccacttccacctcgatcacattctcgttctcctcggaaaccattagacatgtggtataggatgacttcagcatgttgatgaacagctcgttggagagcacgtccagtttcttgacctcctcgccttggacattcacgtcgccagcgaatccatggagcttggcgatacctgccttccgcaccgcggatgatgtagccttgatggcggtctggatggagttgagcagctgggagagatcgccagtggcgctcttgaactttcgctgctcctgcagcacgaaacgcgtcagcgtcatcgcattggagtcgaaagctggcctctgttgggtcattttggctattttatatgcaaaaaaatttagttgtacagtataattcgcttagctgcctcgagtactttgcacaatgcctcgatgcaggtaacttaaaaatgcagctaacttaattttttttttttctattttctattttctatttacacaaaaaaatggaaaaataatgcagatatcttgccgatgcagctaactatcgatgcagctaagcgaattatactgtagtataaaacaagattttaaattttactggatatgattgggagaggattagcataggattggaataaatcgattaaatattagtaatattactttgtaagaaaataaagacaacgagctaagtaatacataacatatataggcagtggaaaggatttaggatggattaaatgtacaactgctgtacaactgaagcggggttttattttggagcaactggttaaaaatatttctggtcagtggaacaagtttgggcagtgcaggcgggcatagtatagatatgggtgggccataaggaaagcacattggggcaaaaggagctgggcaacattggaggagcaggaggcaggaagcaggaagcaggctacttcacttacaatcaccgctactggccgccattattggttatatgtatgtagttgcagtacgctctgtaaatggtgcggttcctgtggggatccattaaggtggaaacaattaccaatttagtagaacttagtagaagggagggggttgtgctcccctatcggaaggtcaaatcggtgacctcgttctgtctctagtggttttttcgggggcttgttgcataaaaaatcactatcaaaaacttgtcactctgattatgcatgtttttgtttgtgtggttgtggtgtctggttgttattttgtatttgactggctgataacctgtttgctctacaaaaaaaaaatcgtacaaatgtgttatggaaaaatatatagaaccacaaaataatatttctgccggcagatctgatacatcgacacgtgcccccttatttatttttggaacgtctccgcgtagaacccgattaactgagtatatatgaacgcatagagtataagtaaacataatatctatagaaaagtatacgtatatctctattaatcttccatagcagtgggagatctaaatgactttcagacgtgtccttaacgccgccattgacctcaaacatttgtggagcttccccgagaacccaagagatgcactttcacttacaacaaatcgacaaactctggcaaacaaacaacgaaccgcggtcgacggctgatctaaagagactaattttggctttagtccacgtccacgacgacggtggagaaaagccagcgaaacgtcactgccggccacgccctatcagagggtatatgcacttggttcagttgcttggagcataacaatgggaaataaggaataataatatctgatgatcctaatgaggatcgtatatggtactgtacatatattcactgttacctaaacatttataaataaaattagggatgtatattcctaataagagtataactaagctattatagattattaattaaagttgaagaaatcataaagtattatagaagaatatacttgatatataatataagaagattcttttaatgttttataaaaattcagtatttccatttgtttatcattcgtatgatctaactgaactattatttaagttatcggcaataaaagttagtgaatagaatggtcggctttctcatcccttctcctacattttgttttgttttcaacggcaactgatagcacgtaaatagcatacacacggaaaatgtatatagaagagagagcggagtggaagagagtccaagtccagatggggagcataagctgcagacatatggctccaaaactaagagggagccacatatgaagagcggaggagagtggtcaggcttaccgatgaaaatgccatcgttaaatgcttcactgtgagaacattttaaacaataagtatgatgtgaaatggtccatgagaatacgagttatactaactaagagtctaaaatcaaaacatttattgtgatttttattgccaacctcttaaaatcgagggaggctcgtctctagcagtttatttcacattgagcttatcaatagcaagataagcccaagagtactacttattagtttctgtattcactgggaaaatacaagtggctaaagcgactgcgacttgtcattgcttcgaccttaggttgtatattattccgaatattat

SEQ ID NO: 42701 - DNA, 1057 bp, DROSOPHILA
cgttgtttgtttgccagagtttgtcgatttgttatgacccaacagaggccagctttcgactccaatgcgatgacgctgacgcgtttcgtgctgcaggagcagcgaaagttcaagagcgccactggcgatctctcccagctgctcaactccatccagaccgccatcaaggctacatcatccgcggtgcggaaggcaggtatcgccaagctccatggattcgctggcgacgtgaatgtccaaggcgaggaggtcaagaaactggacgtgctctccaacgagctgttcatcaacatgctgaagtcatcctataccacatgtctaatggtttccgaggagaacgagaatgtgatcgaggtggaagtggagaaacagggcaaatacatcgtgtgcttcgatcccttggatggatcctccaacatagactgcctggtgtcgatcggttcaatcttcgccatttaccgcaagaaaagcgatggtccgcccacagtggaggatgcactgcagcccggaaatcagctggtggccgccggctacgcgctatacggttcggccacagcaattgtcctgggtctgggttcgggagtgaatggcttcacttatgacccggccatcggagagttcgtgctgaccgatcccaacatgcgggtgccggagaagggaaagatatactctatcaacgagggatatgcagcggattgggaggatggtgtcttcaactacattgcggccaagaaggatcccgccaagggaaagccctatggagcgcggtacgtgggttccatggtcgcggatgtgcatcgcaccattaaatacggcggcatctttatctatccggcaacaaagtccgctcccagcggaaaacttcgtctgctgtacgagtgcgtgcccatggcctatctgatgatccaggctggaggtctggccagcgacggaaagatcagcattttggacattgtgcccaagaagatccacgagcgcagtcccatattcctaggatccaagtccgacgtggaggaggcacttagctacttaaagtgattgttgtgactacagtaac

SEQ ID NO: 42702 - protein, 334 aa, DROSOPHILA
MTQQRPAFDSNAMTLTRFVLQEQRKFKSATGDLSQLLNSIQTAIKATSSAVRKAGIAKLHGFAGDVNVQGEEVKKLDVLSNELFINMLKSSYTTCLMVSEENENVIEVEVEKQGKYIVCFDPLDGSSNIDCLVSIGSIFAIYRKKSDGPPTVEDALQPGNQLVAAGYALYGSATAIVLGLGSGVNGFTYDPAIGEFVLTDPNMRVPEKGKIYSINEGYAADWEDGVFNYIAAKKDPAKGKPYGARYVGSMVADVHRTIKYGGIFIYPATKSAPSGKLRLLYECVPMAYLMIQAGGLASDGKISILDIVPKKIHERSPIFLGSKSDVEEALSYLK

SEQ ID NO: 42703 - DNA, 3441 bp, DROSOPHILA
taatcagggaaactgttccccatatgttcaccatgcaacgaagtagttgagcaatggatgccaaaggatgaaagccttgctccacgaacgtcccattaaaataatgaccgaggagctagggatgagggcaaggaccaggactcgatggcgatgcctgatggcgtgtggcacagtgcacaatgccacccatatatttcaatcgtcgcatgtcgccactttgtgcaacatgcacattgatcaacggaaaggaaagtatgtggcagtgttcagtgggaggatggagagccccgaacggattcctcccggctgacttattcctccgacatattggttccgtccgtccattgttgcatgcgcatttcggcgtacgaaatcaagtgctgccaaaatatcgcagtcacgactcctcggacatggtcaactgggcttcaatgggaagcgctttccttcctcgacggctgggtttatttggaattgatggcccgtcgactggcgaattacacagaacccgtctgtcggaatggctgggtgggtaagtggcgttatgactcgtagagcccagttgccaaactgtgcaaaacttacagcacatttccgttggccaactgagccaacttctctggccaaaatccatgaagtcgctaccaatcattcatgttttgcaagtgaaaagaaaacgatgatttcatgggtatgtctgtatatttagtttatttgtaaaataaaattcagtatatcaaagcagaaacttggccgtttaaattattaacaattccttgggagtattcttattcaaacgaagttttaccaaccaagcttatcatttattcatataatcagaatgaaaatatatttttttcgatgtttgctgcaacatgtaatttaaagtttactaagttgagaacatgtaattgaacagcttatagacatttaggcaaggaaaaaacccataaaagggttagacaaaagcgttactcctaaataatattttttggtcacaatgaagagcacattcaaggaagaaaggattaaggacgactccaagcgtcgcgacctgtttgtattcgtgaggcaaaccatgtgtatagcggccatgtatcccttcggttactacgtgaatggatctggagtcctggccgttctggtgcgattctgtgacttgacctacgagctctttaactacttcgtttcggtacacatagctggcctgtacatctgcaccatctacatcaactatgggcaaggcgatttggacttcttcgtgaactgtttgatacaaaccattatttatctgtggacaatagcgatgaaactctactttcggaggttcagacctggtttgttgaataccattctgtccaacatcaatgatgagtacgagacacgttcggctgtgggattcagtttcgtcacaatggcgggatcctatcggatgtccaagctatggatcaaaacctatgtgtattgctgctacataggcaccattttctggctggctcttcccattgcctaccgggataggagtcttcctcttgcctgctggtatccctttgactatacagtgagttctcaatatgcatacacaaacatatgaacaggaaatactgagtttggcggcacaattcccagcaacccggtgtctatgaggtagtgttccttctccaggcgatgggacagatccaagtggccgcatcctttgcctcctccagtggcctgcatatggtgctttgtgtgctgatatcagggcagtacgatgtcctcttttgcagtctcaagaatgtattagccagcagctatgtccttatgggagccaatatgacggaactgaagtaatttaaatatatatttgaattcatttaatggctaaaatctgttcttgcagtcaattgcaggctgagcaatctgcggccgatgtcgagccaggtcagtatgcttactccgtggaggaggagacacctttgcaagaacttctaaaagttgggagctcaatggacttctcctccgcattcaggctgtcttttgtgcggtgcattcagcaccatcgatacatagtggcggcactgaagaaaattgagagtttctacagtcccatatggttcgtgaagattggcgaagtcacctttcttatgtgcctggtagccttcgtctccacgaagagcaccgcggccaactcattcatgcgaatggtctccttgggccagtacctgctcttagttctctacgagctgttcatcatctgctacttcgcggacatcgtttttcagaacagccagcggtgcggtgaagccctctggcgaagtccttggcagcgacatttgaaggatgttcgcagtgattacatgttctttatgctgaattcccgcaggcagttccaacttacggccggaaaaataagcaatctaaacgtggatcgtttcagaggggtgggtatccttacttagagttaaatcacaattaaactaaaaatatgtgtactttctttatttttcttaagactattactactgccttctcgtttctcaccttgctgcaaaagatggatgcacgagaataaaaatagactacgagtttttcataagattagtgaaataatgatgggtttcaataaaatcattgaaagcgattcgcacagctgaatacctaagtattctattgtttcatctgcacccatcaatatttatttcaactttggcattgcactttcgcacagtgtgttacagaaatacagaaaagtatagatattttaaaagtacgctattgaaaaatgtttaaataacgcatattttggattatataatgcaaaagaaaatcggattacttaataattggctaatttattataacaattataaattaaatatattaaagtcgtgaaaaaagaaagcgtttgaagtaaaacacattagaccttattaattcagtgctcgtattattatagttattaatgtggaatccacattttacataccgccgaagtaaatgctgtatgctggcgcactggaaacggtcatttgactatccaaatttatttaaaaaattatacaagaaattcatgtacatcagagataagttattgactccaaacgcaaattaaatcatatacatttataaggtacttgggttaactctccaactccccacctcgcattcactgccctccctcctcacgatgtgttcccttctttcttgttaactacatttgagcaagttattcgcttaacgatctgtgtgttctgtgtgttatgattcgcattctcatagttttgtgcttggcattttgtacagtatcaaaaatggtttgttgcatgctttccattgcggccaaatactacgtttctcgtttatttttacattacatatacatcgggcaaatgatctaacacttgcttacaattagttaatagaggccttctatgttggtttttatgaaaatgtacacac

SEQ ID NO: 42704 - DNA, 1320 bp, DROSOPHILA
atgaagagcacattcaaggaagaaaggattaaggacgactccaagcgtcgcgacctgtttgtattcgtgaggcaaaccatgtgtatagcggccatgtatcccttcggttactacgtgaatggatctggagtcctggccgttctggtgcgattctgtgacttgacctacgagctctttaactacttcgtttcggtacacatagctggcctgtacatctgcaccatctacatcaactatgggcaaggcgatttggacttcttcgtgaactgtttgatacaaaccattatttatctgtggacaatagcgatgaaactctactttcggaggttcagacctggtttgttgaataccattctgtccaacatcaatgatgagtacgagacacgttcggctgtgggattcagtttcgtcacaatggcgggatcctatcggatgtccaagctatggatcaaaacctatgtgtattgctgctacataggcaccattttctggctggctcttcccattgcctaccgggataggagtcttcctcttgcctgctggtatccctttgactatacacaacccggtgtctatgaggtagtgttccttctccaggcgatgggacagatccaagtggccgcatcctttgcctcctccagtggcctgcatatggtgctttgtgtgctgatatcagggcagtacgatgtcctcttttgcagtctcaagaatgtattagccagcagctatgtccttatgggagccaatatgacggaactgaatcaattgcaggctgagcaatctgcggccgatgtcgagccaggtcagtatgcttactccgtggaggaggagacacctttgcaagaacttctaaaagttgggagctcaatggacttctcctccgcattcaggctgtcttttgtgcggtgcattcagcaccatcgatacatagtggcggcactgaagaaaattgagagtttctacagtcccatatggttcgtgaagattggcgaagtcacctttcttatgtgcctggtagccttcgtctccacgaagagcaccgcggccaactcattcatgcgaatggtctccttgggccagtacctgctcttagttctctacgagctgttcatcatctgctacttcgcggacatcgtttttcagaacagccagcggtgcggtgaagccctctggcgaagtccttggcagcgacatttgaaggatgttcgcagtgattacatgttctttatgctgaattcccgcaggcagttccaacttacggccggaaaaataagcaatctaaacgtggatcgtttcagaggggtgggtatccttacttag

SEQ ID NO: 42705 - protein, 439 aa, DROSOPHILA
MKSTFKEERIKDDSKRRDLFVFVRQTMCIAAMYPFGYYVNGSGVLAVLVRFCDLTYELFNYFVSVHIAGLYICTIYINYGQGDLDFFVNCLIQTIIYLWTIAMKLYFRRFRPGLLNTILSNINDEYETRSAVGFSFVTMAGSYRMSKLWIKTYVYCCYIGTIFWLALPIAYRDRSLPLACWYPFDYTQPGVYEVVFLLQAMGQIQVAASFASSSGLHMVLCVLISGQYDVLFCSLKNVLASSYVLMGANMTELNQLQAEQSAADVEPGQYAYSVEEETPLQELLKVGSSMDFSSAFRLSFVRCIQHHRYIVAALKKIESFYSPIWFVKIGEVTFLMCLVAFVSTKSTAANSFMRMVSLGQYLLLVLYELFIICYFADIVFQNSQRCGEALWRSPWQRHLKDVRSDYMFFMLNSRRQFQLTAGKISNLNVDRFRGVGILT

SEQ ID NO: 42706 - DNA, 4519 bp, DROSOPHILA
agttatggaataacttatggttatatattttagaacatgttttgtgccgggcatcagaagggtcacatagacacgtgtgctggggattcaggaggtccactcctgtgtcgggacaccacgaagcccaaccatccgtggaccatatttggcatcacctcgttcggcgatggatgcgcccagcgcaataagtttggcatctatgccaaggtgcccaactacgtggactgggtgtggtcggttgtcaactgcgatggcaactgcaagatgcactagcatctgtggcatctcggtggttacttcgtagacatggacttgggtccgctaagttgcagaggctgtgaaaaactaatttacactttaagtgttcgaatcgtgcgagaaatcttcgcatgatcaccacaacacaattattatgtgctcattttgaactagaagttgcaaaggaacaaattcgattctaatttagacaaccaaataattgtgtaattaaagtctaaaggcacgtactaattgaaagtactattacttaccacttaatatagttacaattctaacttgcctaatgtacataactgaactcttaatgttttatgctaaacaattactaatgaaattattaatttcttctttaaggttaatataattacggtaggcataagttaaaacaggaatctgagatttaaggttgtaaaataattaataaattataaataaaaagccatatgaactgtaaaaagttaaattgctgtagcttgaccactaaaatacactacaattaacacttagatcctcttaaatggaaatagataaggagaaattcccctataggcgtaccaaagaatcgcagatatgtatattacttattagtttattatattggtgttaaatgctgcacagttttgcttccacaataaaactatttaacgtgatccctatacacattctttttttttttactactacgagtacacaatgaattataaaaacaaacgatcacaatagagaggtgagtgcgtgggcacacatgcaattaatgtatctgtataaaaacatttcatataaattggtttattggttcggtcatcccagcatcccagctgcctaccgctcggctaggacaaagtgaagtgccacggaggacaggaggaccagcagggccactgcgattcccaccatgtaaaggctgcgcgaaagttccggctttggcatcgaactggtcataatcccagaatcgtctatgcaatcagcgtccatcttgcaattgttgaagtgcgtatcatccgggagtccctctgcctccacggatatggtctctggatctagatccacgtccagaatctgtttagcctgggccaccacaacagttggtgcctcgccacggaataagtactcggaaaactgaactactgctccgaccgacgcactgggaccctctgaaggcaggctgaagaacacacgtctcggcggctcactaatgtacagagcttcattggtcacatatggatcggtgagtccatcgcagtacacttgtatacgcgttatcagcgaacggagcacatcgtcgcgtaggaaacgcttaacatctgctatactgtttcgaggattgcagaatacctttgaggtaataatgccgctcatgtgcagcgtgccactaaattcgcgcaccttgatgtccgtcggtttgctcagctggcatttcatggggagcacgatgctcgcccggatggtttcagtgcctccgatgattccttcggacgcaagccgcggcagggagtcagtggtgttgctcgaggcagtggccgtgccacctgttgtcgatgtcggttgcagcttgtccactttcgtctttttctttttgatataggcctgcagatcgatggtgtcctcgacaacttcgttttggaggaatacttcactggcgagcaggttcttgcgcaccgacactatcatactctggaactggtcttcgatgttgacgcgacgcgaggagtccagtatgggcagcacatcatcgaaatcgtagctgcactccagctgaatccactcgaagggtttgtccacaaaccggaactccatattggtgaaagtgccgccgctatcaaaagaaatactcatattatatttaggctaggaaaagtctgaatgtaatcaaactaccatataaacatgaacaatcctaatggttaactaacacataaaatgcattccaagaaataagaaacacaaggacaaggatagcaaagaaagtgattattgaacatagaacataagttatgaaagtacatagttctcaactttttagttaccatatgatgcattttatgtttgccgtaaaatacgtttttttgcaatgtctagttataaattgtaagcgattcgtttggtgaaagaaagaatacacattgagacccgtatctgtgatcagggattacgtttccgatactcacttgccatagctgtagttcttgcagagcactttcttgtcggccagcgaatacgagaggaatacgaaatcagtctgtgcaatgtcggtggtgtagacgccaaacgagctgttgcttttcaggagcaaactggaaaagtaagaaaagaggtcatttcaaatggagactcatatcatactcatatagttagtgacttactcgtaaatatctgaaaacagctttttggcattcttaaattcggcgctctgttcgtttactacatcggatcttactgaagacacaaagattcctgcaaagataaataattcattaataattaattctagatggtaagtcctaaagcttcgcttactttcatcttagttaagtacctaagtttacattactggtttcactacccattactgatagcttaaagatttatctatgacgaaagatcaaaagtttcgaattgacagattaaacagtcaaattgggtgggttagcccatatacaaaacatacaaaaaaaaagggtttggctaaatttcgaatccacgggaggaatacaaggtccccataaataatatgccttagcattatgactatgattatttctgggtagggcagataaaactgcaggggcagcacgcaaacccaccgatgacgtcaaaagatccgggacacattttgctggcgctcagccactgggaggccaatgcctgtgagttgatgtccgagatggtgagccggacctccgacaggtcctccagatccgcatcctcctcgttgttcctggccaggtggaccaccacgctcttggtgagatccgcttgctatttcaaccgaagcggatgaaaccaggagaaagtggagattcagttgagcgggggaaccaaacaaaatctacgtggcggatggcacttacatggcccacgattatcccgtacgagaactggttctcctgtgcgcatttctccaggtacagctcgtcgtgtttgctcaacagcactgtgcgcatcgtggctctggggtttctgtttacttcgtaaatttaatgttaactatattcgttccgaaatgacaaatttttagagctgggtacaccccccacgatagtagctgtaatcgaatacttgctatcgaggctaaatttcgatagtgagcgatagtgctaagctattcaaatttgaattcaattgctatttattttcggattttaaaaataacgccacaatcaagtccattgaccttaattaaatggtgtttgggaatttatttattttgaatgtgccgactatcgatacgcaccagctctatgaattggtgtgaccgaaggttatattttaaaagtatggattatgaggtaaattcttatcgatatttaacgaagtttatttaaaaaagcttgccatctctagaaaactgttaaatttaaaaatatattcgaaattttaaaaagtgtaattaataaaacaacattaccctttttttttactaagaataactactaaattttacatgtttgtccaagatttatttaaaaagtgtttcaaataccatgtgcaacatctagataatataatatatatgtttaacagctcctggcgaggcatttaaaaaaaaaaataacattcaataactgtatacgtataaatacgtaaatataccttatttaaataactccctgaatgtttatacaaattttatgagaataggcacactttacttttatcaattagaacatgattgaatagatttatttattaattttaagaaattgacaagcagtaatttaaagaagactctttgatatagggttgtttattattgaaatgtaattgcagtttacttttgatttttctttacgaatcgataaagtccttgagtgtttattttcctaatctttagacactcgacttaggatattaagacttaatttacctccgcgactgcaaagcgatgaaagtatgtatgtatgtacccccgtggcaggttcttcaattaaggcccccggctccagcagcaacataatctccatctccatctcccaattccgctgcactgcatcagctgccgtggggcgattacgcacga

SEQ ID NO: 42707 - DNA, 1656 bp, DROSOPHILA
ctctaaaaatttgtcatttcggaacgaatatagttaacattaaatttacgaagtaaacagaaaccccagagccacgatgcgcacagtgctgttgagcaaacacgacgagctgtacctggagaaatgcgcacaggagaaccagttctcgtacgggataatcgtgggccatcaagcggatctcaccaagagcgtggtggtccacctggccaggaacaacgaggaggatgcggatctggaggacctgtcggaggtccggctcaccatctcggacatcaactcacaggcattggcctcccagtggctgagcgccagcaaaatgtgtcccggatcttttgacgtcatcggaatctttgtgtcttcagtaagatccgatgtagtaaacgaacagagcgccgaatttaagaatgccaaaaagctgttttcagatatttacgatttgctcctgaaaagcaacagctcgtttggcgtctacaccaccgacattgcacagactgatttcgtattcctctcgtattcgctggccgacaagaaagtgctctgcaagaactacagctatggcaacggcggcactttcaccaatatggagttccggtttgtggacaaacccttcgagtggattcagctggagtgcagctacgatttcgatgatgtgctgcccatactggactcctcgcgtcgcgtcaacatcgaagaccagttccagagtatgatagtgtcggtgcgcaagaacctgctcgccagtgaagtattcctccaaaacgaagttgtcgaggacaccatcgatctgcaggcctatatcaaaaagaaaaagacgaaagtggacaagctgcaaccgacatcgacaacaggtggcacggccactgcctcgagcaacaccactgactccctgccgcggcttgcgtccgaaggaatcatcggaggcactgaaaccatccgggcgagcatcgtgctccccatgaaatgccagctgagcaaaccgacggacatcaaggtgcgcgaatttagtggcacgctgcacatgagcggcattattacctcaaaggtattctgcaatcctcgaaacagtatagcagatgttaagcgtttcctacgcgacgatgtgctccgttcgctgataacgcgtatacaagtgtactgcgatggactcaccgatccatatgtgaccaatgaagctctgtacattagtgagccgccgagacgtgtgttcttcagcctgccttcagagggtcccagtgcgtcggtcggagcagtagttcagttttccgagtacttattccgtggcgaggcaccaactgttgtggtggcccaggctaaacagattctggacgtggatctagatccagagaccatatccgtggaggcagagggactcccggatgatacgcacttcaacaattgcaagatggacgctgattgcatagacgattctgggattatgaccagttcgatgccaaagccggaactttcgcgcagcctttacatggtgggaatcgcagtggccctgctggtcctcctgtcctccgtggcacttcactttgtcctagccgagcggtaggcagctgggatgctgggatgaccgaaccaataaaccaatttatatgaaatgtttttatacagatacattaattgcatgtgtgcccacgcactcacctctct

SEQ ID NO: 42708 - protein, 492 aa, DROSOPHILA
MRTVLLSKHDELYLEKCAQENQFSYGIIVGHQADLTKSVVVHLARNNEEDADLEDLSEVRLTISDINSQALASQWLSASKMCPGSFDVIGIFVSSVRSDVVNEQSAEFKNAKKLFSDIYDLLLKSNSSFGVYTTDIAQTDFVFLSYSLADKKVLCKNYSYGNGGTFTNMEFRFVDKPFEWIQLECSYDFDDVLPILDSSRRVNIEDQFQSMIVSVRKNLLASEVFLQNEVVEDTIDLQAYIKKKKTKVDKLQPTSTTGGTATASSNTTDSLPRLASEGIIGGTETIRASIVLPMKCQLSKPTDIKVREFSGTLHMSGIITSKVFCNPRNSIADVKRFLRDDVLRSLITRIQVYCDGLTDPYVTNEALYISEPPRRVFFSLPSEGPSASVGAVVQFSEYLFRGEAPTVVVAQAKQILDVDLDPETISVEAEGLPDDTHFNNCKMDADCIDDSGIMTSSMPKPELSRSLYMVGIAVALLVLLSSVALHFVLAER

SEQ ID NO: 42709 - DNA, 4670 bp, DROSOPHILA
tttgctattatatcatatcacaatgcttaaagggctcgccgcttctcgattctcgattatcgattatcggttatcgagttttgttctcgatttcgatttgggcttcaaattcaacaacgtttgattgccaaacgacgatctatctatagagttctaatataacaggctcactggtcgctaggctaaaccatacagctcgcgaaataattgtatttccattggctttatcaatgctatcattattgattttactccattacgatctctatctatcagttttcattggatttacccaacgagaatggaacttaaagtgggaaatttgagctgccaagtggcagatgatttgaaatggtaaaataatatgagagctctgaaatgtagccaagtaagataaacaggccctttttgggacacacatctacaaatgttctgtttccataaacaagaatggaaataaatatgctatatagaaataatatctaatagatagataatgccagtttatgcaattatttcgctcgctgtatgcgacaaatttcaacaagtgtgtggactcttttgttttcgtttttcagatcgaggttgcatcatcatataagatatactcggttcaataaaaatcggttcataacaattagtgcgctcaaatatgggtagctaggttactagttaagtggatcgtttgtcctttggtgcgggtttttagattacataataatacttctggttgtgtgtgtgttcgtaagcagtagaaaagtaagaaagtctcatggctagagtgtggtaaatgcaattttccacaaggttttcttctgtttttttcgtcgttctcttcttttcttcttctcccccccaaaaaaggtatatctcttctacgaaaggggtttttccaaattaaaagggcggtgcagttagtgtcgtcagtgaggcagaaaatttcgccgttgatgtgagccgccgccgtcgtcgccgtctgtgatcttcgcgagacttctatctagacgatgctgttccgcttggcggtggagcgttgcagggtgttttgcatggcggccaccaccgcctcggcgccgcccgtgaaaatcggctgattgaccgcacgccgcaggacatgccacatggccaccggtttcctaagcgacgagagcatctggtgccaatggcgcaatcccttgcccaccgcacagctgccggccacgatgtgacccaacggggtcaccccactagttgtcaccccgaacacggtcacccgcagctgggtggtggtcaaactgggtggcggcacactgaagatcatcgattcgttgaagatcggactgcgatccttgcgcttcagtgaggtgcgcttctttagcaccttgcgatccttgtccatcaggtagaccttatgatgaaaataagtaaagattaatatcaattagcaattggtgaccccgaacttatatattatagatttcccacccaccttaacgaagacgctgtgcaccgtttccgcggattccggagccggttgctcaccgtccagcttgagattccgtgccttgaccacgacgatggttagtctttccgccgtgggcagatagcttagagagaacattagctcgccccagcgggcgttgcacttgcgcgaatcggacagtggtatccatgtggtaatggggcgtggcatctcaccaatttccatctccgcctcgccaatgagcgtgtgggcgggtccattgtggtacagatggaaccacagcgaatggcgcgcctgtcgcttgtgcagccagaaatcgaaactttcgttgtagctgggtgtcagtgttcccttgaccacctgaatagtaaatggcaaatatgttatataatatgaattttgctagtgtttaattcaatttcaccttagtttgcatagctcccggatgatccggcaccaagtagatgcgcacaaaggtgtccagggattcaacgctgaatggacatatgagtcccttggcctccaggacactaacagtcagttccatgccctcgttgctaatactcatcctttgtaatggatttatgaatctatgtagcatagagataatttctaaaaacaacttactgatcgtagttaaggccaacgcataaatatccggttatctgagtgtagggctgatccaattgatccaggaatagagtggagtccgaggttaccgaatcgcaggagatggctcgctccaaattgatgccatccattgaaccgggcaccgatcccgcatgtgaatccagggatacctgggagctgttccttctgcccaagcccatgcccagactcaatgtggagtcctgtcgcaacagggagcgtccaaaggaccaagttccattgccatttccgttgacatgaccagatcctggtcccgtaccattgccattggccatcggacaattgacacccaatttccgaaatagataatcctccgaaatggtcttttgcagtagatgcggacccttgacgcgttgcgagagtcccgtgaaaggattcgttgtgttatggatcttcaggagtctgctggacagactttctctctccacgaagggattgccattgtgatgtatggtggatggagtatccgttgaaataggcccatttggagtctctagaggagcagttataggagtacattcacttgttgaaatagtcgttttttccagagaagccaccgtggcattcagaggttcagaaatgggattactgggtatctgctccgttgattcgcacaggaagggattagtgctggagtttctacgcttcaaggcaggcgcttttctctcaccctcccgcatcggggtcaccacggtctgctccggctggcatccgctattgttggccggctgcgtggacacttgccgcttggcaatgggccttggaatcgccgtacccgataagttcaccgacgtcgatgcggtgagtcgtggcggaggtggtgcctccagtggctgcggcagcacaccaccgccgccagcaccgcccgcagttccaccattttgtcgcaggcaggagcgacgttcctgatcgttggatgtcacctgctcgccgggcatgatgacctcgtttacctggctcaaagagaaggtaaccgttttgccggctgctgcagcactattcggagatggagctggtcgatcgggcggtggtggaatcttaatacccgaacgcggtagatgccacatggccgtggtggcctgcagggcactggatgatccggttatcgaaaccgcaccgccgccgttcatcaggaacagatgcgtctgatgcgtctgctgggagcgattgtagtcctccttgtcgatggtatcgaaacgcttgaaactaccactggtgctcagcaggaactcggagccggattgtatctgtggatgaagagaagtgcagatattaaatatttagaatttattaactaattgaagtattaacatcctcagatacatttataaaaatgcgcaggatacttacactggccatataaccattggcatggaagagcttttgcttgtgattggatagtccgatcttttcctccttgctggatcgcatacgcatccagttggcggcccgcggaccaagacagtggcaggcgaacaagatgcccaggatcagaactgccaggagcagtagcgccaaggtaatggtgaagctcatcatatccgaacgagtgccattcgtttaccaatcgtgatgcatctctccgttcttctgatggaataaaatatgctattttacgttgctaaactttgaattggatatcttttatcatatctttttagataaagtataatgttgcatttcttcgttttccttcacaactcaactggataacaatgactcatctgtgcgcagttttcacattctcaaaaaacgaaaataaaacccaaatgttttcatcggaaactgatgacaatgggggtatagatgggaggcatggcattctagagatttgaaaaacactttcatctcgcatcgctttacactgagcaatttgcctcatcattgcgatgtgggtgcgtgtgtgtgtgtgtgtgtgtgtggggttttcttttgggggggcgtgtacaggtgctcgttctcgttctcaatcacaaactttgacagtttctcaattgaatttgtaaccgaagacgcagcattgccacttcaaagcggcggccaccagaaggggtgacacgccatgctcgtagaagtgctgcggatgtggaggaggttggtccaacgcgaccattgtcatggatcattccgttgacagacctccgaatctctttatcatccaccttatcatccgcaagggactgatgccacgtcaggcactcaacgagcttaggtaactcgggacttatgacggattacagtcaaacctcttcgcagtgaacacataactgcatttttgtccaaaaatcattcccttgatttattgcaaaaaaaaatcagttttttgttcagaacttttgaaagaatgatccaaatatggaatatcatacctcgttgaactcgtaattaaattcctaaccgaactgtattcaaaaaggaaaattctaatttttcgccattttttgcaaattttgatgatgttaccccttacaaaaaatgcgaaaatttggccaaaaaattattttacaaaatccgttcaaaagtgatagggatggttagt

SEQ ID NO: 42710 - DNA, 2364 bp, DROSOPHILA
atgatgagcttcaccattaccttggcgctactgctcctggcagttctgatcctgggcatcttgttcgcctgccactgtcttggtccgcgggccgccaactggatgcgtatgcgatccagcaaggaggaaaagatcggactatccaatcacaagcaaaagctcttccatgccaatggttatatggccagtatacaatccggctccgagttcctgctgagcaccagtggtagtttcaagcgtttcgataccatcgacaaggaggactacaatcgctcccagcagacgcatcagacgcatctgttcctgatgaacggcggcggtgcggtttcgataaccggatcatccagtgccctgcaggccaccacggccatgtggcatctaccgcgttcgggtattaagattccaccaccgcccgatcgaccagctccatctccgaatagtgctgcagcagccggcaaaacggttaccttctctttgagccaggtaaacgaggtcatcatgcccggcgagcaggtgacatccaacgatcaggaacgtcgctcctgcctgcgacaaaatggtggaactgcgggcggtgctggcggcggtggtgtgctgccgcagccactggaggcaccacctccgccacgactcaccgcatcgacgtcggtgaacttatcgggtacggcgattccaaggcccattgccaagcggcaagtgtccacgcagccggccaacaatagcggatgccagccggagcagaccgtggtgaccccgatgcgggagggtgagagaaaagcgcctgccttgaagcgtagaaactccagcactaatcccttcctgtgcgaatcaacggagcagatacccagtaatcccatttctgaacctctgaatgccacggtggcttctctggaaaaaacgactatttcaacaagtgaatgtactcctataactgctcctctagagactccaaatgggcctatttcaacggatactccatccaccatacatcacaatggcaatcccttcgtggagagagaaagtctgtccagcagactcctgaagatccataacacaacgaatcctttcacgggactctcgcaacgcgtcaagggtccgcatctactgcaaaagaccatttcggaggattatctatttcggaaattgggtgtcaattgtccgatggccaatggcaatggtacgggaccaggatctggtcatgtcaacggaaatggcaatggaacttggtcctttggacgctccctgttgcgacaggactccacattgagtctgggcatgggcttgggcagaaggaacagctcccaggtatccctggattcacatgcgggatcggtgcccggttcaatggatggcatcaatttggagcgagccatctcctgcgattcggtaacctcggactccactctattcctggatcaattggatcagccctacactcagataaccggatatttatgcgttggccttaactacgatcagatgagtattagcaacgagggcatggaactgactgttagtgtcctggaggccaagggactcatatgtccattcagcgttgaatccctggacacctttgtgcgcatctacttggtgccggatcatccgggagctatgcaaactaaggtggtcaagggaacactgacacccagctacaacgaaagtttcgatttctggctgcacaagcgacaggcgcgccattcgctgtggttccatctgtaccacaatggacccgcccacacgctcattggcgaggcggagatggaaattggtgagatgccacgccccattaccacatggataccactgtccgattcgcgcaagtgcaacgcccgctggggcgagctaatgttctctctaagctatctgcccacggcggaaagactaaccatcgtcgtggtcaaggcacggaatctcaagctggacggtgagcaaccggctccggaatccgcggaaacggtgcacagcgtcttcgttaaggtctacctgatggacaaggatcgcaaggtgctaaagaagcgcacctcactgaagcgcaaggatcgcagtccgatcttcaacgaatcgatgatcttcagtgtgccgccacccagtttgaccaccacccagctgcgggtgaccgtgttcggggtgacaactagtggggtgaccccgttgggtcacatcgtggccggcagctgtgcggtgggcaagggattgcgccattggcaccagatgctctcgtcgcttaggaaaccggtggccatgtggcatgtcctgcggcgtgcggtcaatcagccgattttcacgggcggcgccgaggcggtggtggccgccatgcaaaacaccctgcaacgctccaccgccaagcggaacagcatcgtctag

SEQ ID NO: 42711 - protein, 787 aa, DROSOPHILA
MMSFTITLALLLLAVLILGILFACHCLGPRAANWMRMRSSKEEKIGLSNHKQKLFHANGYMASIQSGSEFLLSTSGSFKRFDTIDKEDYNRSQQTHQTHLFLMNGGGAVSITGSSSALQATTAMWHLPRSGIKIPPPPDRPAPSPNSAAAAGKTVTFSLSQVNEVIMPGEQVTSNDQERRSCLRQNGGTAGGAGGGGVLPQPLEAPPPPRLTASTSVNLSGTAIPRPIAKRQVSTQPANNSGCQPEQTVVTPMREGERKAPALKRRNSSTNPFLCESTEQIPSNPISEPLNATVASLEKTTISTSECTPITAPLETPNGPISTDTPSTIHHNGNPFVERESLSSRLLKIHNTTNPFTGLSQRVKGPHLLQKTISEDYLFRKLGVNCPMANGNGTGPGSGHVNGNGNGTWSFGRSLLRQDSTLSLGMGLGRRNSSQVSLDSHAGSVPGSMDGINLERAISCDSVTSDSTLFLDQLDQPYTQITGYLCVGLNYDQMSISNEGMELTVSVLEAKGLICPFSVESLDTFVRIYLVPDHPGAMQTKVVKGTLTPSYNESFDFWLHKRQARHSLWFHLYHNGPAHTLIGEAEMEIGEMPRPITTWIPLSDSRKCNARWGELMFSLSYLPTAERLTIVVVKARNLKLDGEQPAPESAETVHSVFVKVYLMDKDRKVLKKRTSLKRKDRSPIFNESMIFSVPPPSLTTTQLRVTVFGVTTSGVTPLGHIVAGSCAVGKGLRHWHQMLSSLRKPVAMWHVLRRAVNQPIFTGGAEAVVAAMQNTLQRSTAKRNSIV

SEQ ID NO: 42712 - DNA, 4394 bp, DROSOPHILA
atgatttagatgttggcttacaaaaaaacatgttttattacggacccggttggccccaatccattctgtctaaattcctccgatgcgaatacactttgttttcttctaaaccacttttaagacttctttttagtttacatatattaattctccatatgacgcttctcaagcttaatatatttgagtgaattttaaatgaatgttttccacttatgaacacgctagttacacacaaggtgttaggattgaatcacctcctcgcagagccaataccaagtgaagaacggatccaccttgcactttgtagtccgccgcggttttatcgtcattcctgggggggatcgcatgcgaaataagctaaaatcaatgaccaatagccagaaagactcacatttgcttgccggagaaaataagacgctgttgctggggcggaatgccttccttttcctccacgcgctccttgatgcgatctaccttgtccgtgggctcaatgtcgatctcgatttccttgccggtcagggtctaatggaaagataatacatatttacattaataatccagccacacatatattgactgtaatattcgacgattttgttgttgttcaaagtgcccgctgggcacgatggctgtgatttatctttatcctacttttttgctactccatatcttccacactaaccttcactttgatcaacattttgtgtgtatttaactaggcgctcctgtacaaattcaaaattgccgaaatttttgcaaatctccacagctggttctcttttttggctgtcactttcggcgttggtacgactggcaactatcgatagtactgtcgatgaccatcgattgttttccacactattacaaatatagtattttctccatcattccatctctacacaattcacgtgtaaaaaaatacatttcgaaaaaggagaacttaatttatgtaaattttttgtagcttgatttatagtgtgcccattacggttagaagtctcacatatttagaattcaaattctccttaaattattttactcatgagatgcaaaaatccattgaatgccattactacattttttaacttttgaaaaaaatggaaggcgtcacttttgagggatttgaattaagagcaatttgtttattaatgttttatctcggatcttagaaaattaaaaagtatttttttgtcttttgtcttttctgttttattaaaataagttgtatgccttaataactaaatacatttatttacagtactaaatggataactactttgttcttttcgaaggtactgagatccccagcttagaagttcatccctatgagagcttcttcagtttgttccagtcgcgaatggcctccccgatgtggcgtatatccctcgcataagtgcgacagcatcccccaatgaccttggcccccagttgcgcccactccggaacgtagttcgccaagggcacacagtgctcccttccctgccagccgttgaccacgtcgtatacctctccgctattggggtacaccaccaacggtatctgctcacccacttcgcggtcaccattcaaactcttaaagagcggggtcacaaacttcggatgcacacaatttactccgatggccaggcacttatcctgggcatttcgttcagccaagaggtcccaaatagcattcgccgcgtccgcaaaggtttctccatgcgccagggtattctcatccttgcactggaaggccacccagaacttcacatccggataatcatcgcacagcatctccaccagggcctccgcctccatttgacagggaatcgtctcgatggccagcgcatccacaccagcctccaagcacgcttcgatcctcacgcgatgccagtccgtaatctccttggccggcacaaagtcggcatagctaccggtgtactcggagccatcgtgcaggtgggccccaaagggtccaatggaggcaatgatcaaagggtatcctttaaaaacaataaattggaatatataattggtaaatattactatatataaaataaagtattaaagaaagtattaaaagtaatgaccctaccacatcattcacttgaccacaatctaaattaatcccgcccgagctggacctcatggatgtcaacttaccctcctgcaccgacagctgcgcctgatagcactcggtgagatagcgttccttggcgatgtgggccaggcggaccgtgttctttatcagctcgatgctctgctcctcgtccagctccaggtactccatgtaaccatcgacactggactggtaggtgttggtcaaaatgatatcggcaccatctggtgttgtcaaggggaaaattcagttagtatgttgccaattgctaccggaaaacaattgcttactctgcaaaaagtccaggtgggtgctgataatggccgccggattggtggcattgaagcgggcactccatagcggatccccatccacagagtcacccacatggacggtcatctgggtgccgaaaccgccatccttcaccagcacgcgcgtcaaacccatgattgaaagattactaagaggggtggaggatgatccgttgaaaattgattattagttacatttctacgtcagcgggctgcgagataattaaatatgtatattgcgtctgccacctggattccactgcactcagggcgatgttatacaatgtatcggaagaactaatctctatttttcagttcaacgaacttggcagaacaaaagaccagtggcttaatctaaaaaacacactgagaaaaacagctcaaagttctttagctaagatatatgttatatgagtcttatgatttattataaaaaagatttaattctaggagtattcagctttcactgaatagtatacaaatttaaaaccaaggtcacatttttacgtatctcaataaatggcgagttaaaagcctgaaacattttattctgtatacgctaaattcaaaatatacatcagctctttaaaatttggcaacaatttttgagaaatatatatcttttaaagtgaatcatttattacgtttcaagatctattcttgttccaaattaaaaaatatattaatatttaatatatgtaagtattccaagcataacatttttagattgcttataagatccctttgttgcacttttaagcatactccttggatagtgtatacaccgtctgtcatcaaaatctatcggtagggaagcgaaaaacacacgataaggtctcgcactcaccttgacagcttgtttatggatcttgtaaatgggcaaattcaataacaactttattagacactagactggctggttggttatcaagtggttatcacaaatctttcggaacggtggatatgatcagtcgcaatggacgctcgacgaacgtttaaatgtttcacgtatcgtcgaggggcttttatactttccgaagggccactcagctgtgcggctcggcttatcagggcgaaatttataatatttataataatttataacaaaacaaaacggcaaacacaaacatgagagtgcccccaccaagtgggtgataagcccggtgcacagctgccagacgctggccagccagattggattgtccgggtggactgcgactccccctccacgaggctgatgaagctgatgaaatcgtcaaagcgccgctgtgcgtggttctggcttccgagtgactctgctcgggatgtcgcatctgctaagtcgacgccgataacctctggacgccgcctaggaccaacacttcaagatgtacttggttgttgactctgtcctccttaaaggaaaatgggtgagcttccgaccgcactcaatagattatggtccaaaaataggtctactgatgtcaaagagaaaaacaacatttaacccctattctggtaaacaaatcgctaatgaacaggaaataagacataagatatatcaaataaaatctcctctaaaagagatgagcttaaagtgatgattgttattaatatttggacaaaaaaaaaataaataaataaataaataaataaagtaaaatgtaaagtaagagattgaccgacaaaaggctttcaatttgaaaatggccgttaaaatcatgttttttgaacgaagtatccgattaggctgattgccagattgggtcagagtgcaataggtggacatgtggctccaccatcctcaaaagcttcaacagccaaaaatgtaagtactcttttaaaaatgcggtatgaagttccaaaaaattttgaaatatctttcatagtgataaagtcgagaaccgcaagaatagaagggcatacccttctctataaagtaccttgcgtaccagaaggcgtttgccttggtacatatgtaagaagtgattagatttgatgaatct

SEQ ID NO: 42713 - DNA, 1470 bp, DROSOPHILA
agcgtccattgcgactgatcatatccaccgttccgaaagatttgtgataaccacttgataaccaaccagccagtctagtgtctaataaagttgttattgaatttgcccatttacaagatccataaacaagctgtcaagtaatctttcaatcatgggtttgacgcgcgtgctggtgaaggatggcggtttcggcacccagatgaccgtccatgtgggtgactctgtggatggggatccgctatggagtgcccgcttcaatgccaccaatccggcggccattatcagcacccacctggactttttgcagaatggtgccgatatcattttgaccaacacctaccagtccagtgtcgatggttacatggagtacctggagctggacgaggagcagagcatcgagctgataaagaacacggtccgcctggcccacatcgccaaggaacgctatctcaccgagtgctatcaggcgcagctgtcggtgcaggagggataccctttgatcattgcctccattggaccctttggggcccacctgcacgatggctccgagtacaccggtagctatgccgactttgtgccggccaaggagattacggactggcatcgcgtgaggatcgaagcgtgcttggaggctggtgtggatgcgctggccatcgagacgattccctgtcaaatggaggcggaggccctggtggagatgctgtgcgatgattatccggatgtgaagttctgggtggccttccagtgcaaggatgagaataccctggcgcatggagaaacctttgcggacgcggcgaatgctatttgggacctcttggctgaacgaaatgcccaggataagtgcctggccatcggagtaaattgtgtgcatccgaagtttgtgaccccgctctttaagagtttgaatggtgaccgcgaagtgggtgagcagataccgttggtggtgtaccccaatagcggagaggtatacgacgtggtcaacggctggcagggaagggagcactgtgtgcccttggcgaactacgttccggagtgggcgcaactgggggccaaggtcattgggggatgctgtcgcacttatgcgagggatatacgccacatcggggaggccattcgcgactggaacaaactgaagaagctctcatagggatgaacttctaagctggggatctcagtaccttcgaaaagaacaaagtagttatccatttagtactgtaaataaatgtatttagttattaaggcatacaacttattttaataaaacagaaaagacaaaagacaaaaaaatactttttaattttctaagatccgagataaaacattaataaacaaattgctcttaattcaaatccctcaaaagtgacgccttccatttttttcaaaagttaaaaaatgtagtaatggcattcaatggatttttgcatctcatgagtaaaataatttaaggagaatttgaattctaaatatgtg

SEQ ID NO: 42714 - protein, 331 aa, DROSOPHILA
MGLTRVLVKDGGFGTQMTVHVGDSVDGDPLWSARFNATNPAAIISTHLDFLQNGADIILTNTYQSSVDGYMEYLELDEEQSIELIKNTVRLAHIAKERYLTECYQAQLSVQEGYPLIIASIGPFGAHLHDGSEYTGSYADFVPAKEITDWHRVRIEACLEAGVDALAIETIPCQMEAEALVEMLCDDYPDVKFWVAFQCKDENTLAHGETFADAANAIWDLLAERNAQDKCLAIGVNCVHPKFVTPLFKSLNGDREVGEQIPLVVYPNSGEVYDVVNGWQGREHCVPLANYVPEWAQLGAKVIGGCCRTYARDIRHIGEAIRDWNKLKKLS

SEQ ID NO: 42715 - DNA, 5268 bp, DROSOPHILA
gaagagcagcaggatttcatcacgcttcaatgcggcggtggtcattttgcatttaaattttgtggtaaatcagcaggtgtttaatatccagatatttatgtccacgtatgattcgagataaagaattttacaagcggcaacgcagtggtgagaaatcccctaaagctttcgatgcaccggcaaggggaaccagttccggaatccaagtgcaatcaaaattaatgttttgaattgccttttacgttaggtttactatttaaaacaatgagagtataaacattcaagcacaatcatttggattttcctgcatgtataggtaacagtttaattcatggagttcatgctgtcagggtacaaatagtttctattttaatagcaatttgtacattgcagttctttatcaggcaaactagaatacacatatttgggttcttaagtgtagcataacagggggttctactgccttttaatgtgctgcagttcatctctcttgattttgctgtattcctgcagggttttgtatttctcagtgttaaccatggggtccacaatgacggggtatagggtgaggcccacggcgcccacgatgcaggacacgaatccaacgaatctccaaccacgcaggactgccatttagctaaaatatggaatattttagctgacttttcggtttgttattataaaacacaaaacacctggttgaccgtaagatgctagaaaacgccaagtgtgtggtcacactactgtggtcaccggtgaagtgcagtaaatactacagaagagataacctgatagaaagtaaaatataaataaacaagattactgtatatataataaaaatagatataggtatagattaaactagaaatatcctgaatgctaaatatgtttcttgattcatatctcacttaagcattctccactgtgtgtacctgttggtattttttgaaatcatgtctatttctgcccgctctggttacactggcttccttgagctgggcttgggtgtggtgttttgtttgagtaattgtttttgcagatagatctttttagttaatacacttattaatattcttatatcccgaatatggctagcagcctcgtttttgtggctctagtcggcgccttatgttttacgctcgctaacggtaagttgcggctggaatacgaaagtcgcccatttctagggcgttggcatgagttaaaaccacgattttgcagcacaacatcactacgatgagcacaagaccacacggatggtgtggtgcaccaagagccaggcggagcagtacaaatgccagaaccttacggtggccatcgagcgggatcgggcactattcgacgaggtgttcctcaatctcacctgcttcatggcctacagtgcggatgagtgcatccatcacattgatcgcgagaaggcacacatcaccacgctggatgcgggcgatgtcttcactgctggacggtacaactccctcatacccattatgcaggagaaactggagggcggctttgcggactatcaatccgtagccgtgatcaagaagggatctctaccagacttgaacaatctgcgcgacatgcgcaacaagagggtgtgcttcccctgggtgggcagcttggccggttggattgtgcccattcacacggtgagtagaactcctcttttaagttgattgtttatttgtttcattaggcaactaacaaacaaattttatcgttttgcagctccaaagggagggcggcatggaagtggtggactgcaacaaccaggtgaagacggccgccagctatttcaataattcgtgtgctgtgtactcgctttccgacaaacacaatccaattggcgacaactccgataagtaatgacgcataaaagccacaattttacacacattaactaacaacaaatcaattttcaaaccagactttgtacgctttgcactggaaagatacccggaggacgctgctcatctgcagatccctacttcggctacgaaggcgccttcaaatgtctgcttgaaaaaggagatgttgccttcttgcgccattcgactgtgaatgaaatgctgcaaaccaccgaattcagtgagttaccaaagggaaacttctgaaaacccattactgatctaagctgcgttttttagagaacatagcacccgacacttttgagctgctgtgtcgtgatggtcgtcgtgcctccatcaacgattatcgccagtgtaattggggccaagtgcccgccgatgccattgtcacatcttcggctcgcagcttcagcgatcgcaagcagtatcagcagtttttgaagcgcattgccgagctgtactccgatggcacacgtgatgatcagagcaggcagggaggacaaagcttcaacagccgcaacaacatcaacgatcagaatgcctatggccagttcgataataatgatccgtacagaacgcagaatcaatacgatcagtatcgcagcgaacgattggacagcagttttgcagaggaaagaaaccagcaggacggcacgaacacttccatactctatgagaagttccgcatcttcgagtcgaagcgctatggcaagccaaatttgctgttccaggtaagtggatcatattttccgtgatccgaaatacatacttaacattcaattgttttgtgacaggattctagtcgcgctctaaccgtgattcccgaagatgatcagtcatttaccaagtacctaggccctgccattaactttatctacggcatccgtgagtgtccagttccagcgatgacgctttgcgtgacttcggagaatgagcttgataaatgcatcaagatgagggtgagttgaagagtgaatatatggatagcaagatgagttgatgatcctttacaaaaacacttttagactgccttgaaagctcacctcctgaaaccagaactcatctgcaagaaaatgcactcccacatcaactgcatgcagttcatcgaagcgggcaaagcagacatctccgttttcgatgccggcgatgtctacactggtggcctcaactacgacctggtgcccttcatgtcggaggtgtacaatctgggcgagcccgagtattatgtggttgccgtggccaaggaggatgatcccgatacggagctaacttacctgaagggtaagaatacctgccatacgggcattaacaccgccgctggctggacatatccgatggcgcttttcatctcgaacggctggattcgtccctacggatgcgattcggttcgagctgccgcggagtacttcaccaagtcgtgcgtgccgggtgccattagcaatgagtacaacaccggtgtgccctacgacagcatgtgcgatctgtgtcatggaactagctatcgctattgtcgtcgcgatgcctccgaggaatactacgggcacacgggtgcattccgttgcctcgtcgagggcggcggtcacgtggccttcatgaagcacaccacggtgatggaaagcacgggcggcaaacgcaaggaatggtgggccaggaatgccctaaacgatgactttgagctgctctgcacggatggtactcgtgccgagatccaggactacaagcgctgcaatctgggcaaggttaaggccaatgctgtggtcacccgcggcggagtcaactacaacgagacccagatgaatgcctacatcaatctgctgacctatgcccaacaactgtacggtcgcaaggaagtggacgccttcagtttcagcatgttctcctcgccgatcgggcactatgatctgatcttccaggacgccacgcggcagctgcaagtaattccgcccaataagcgcaggtatgatgcctatttgggcagcgattttatgcgagcacgccgcatcaccgactgctatgctggtgcctcccagttggcattatccgtgggcctgctcctcgtgggttcgctggttgcaatgctctaagccactagactcacttagatttcagaattctacaagcatctctagcacaaagagaaaacatatcaacatttttacattccaaatatgattaagttaaatgtgaaatcccttccgtccgaaaatgaaactctaactagccgaaaaatatctgttgaaggctatagtttataatttataaagtcctgtgccttattatagtatttgtttgtgtacataccaactaagaccgtccaaaaaatgtacctaggagatgtaagccgaatcttttacaaccgcttatgtaagtatacaaataaaataactagataaaggagttattttgcttattttgaattagtatcatttgaagaatcctaatatcttgaccgcaattgtagccgccaaattcaaattgaatatgtgcgctaacatcgctttgaaacatagatgttattgaaatttacgctggtaaatattgcatttaaccttaaaacactctgtattgtttataaagccagtaaaatgtttgaaattaaagaaaatagcgtagttacaagtttcagcgcagtgtgaccgcttggccgcataagcaagggtggaacagtgccgcgaaacgacggtcacacccgcctgcacacatctgtggaattgttaaatttcgaaagtccggaaaaaccggacggaacctttcacctcgctctggaccagtggcaccgccctcgagtatcgcaagatgtctattaacctgcgcaccgtctacgccttcgcccgcgagatgtacccaaagacctccaaggagaccatccaatatggaacagctggctttcgcggcaagtgagtagttgcctccattaacgatcttaataatcatcataatcattatgctaacacacccacacgatgcacacgttggcgcatttgattagcacacggcgattgttggtggtttttttttttttttgataaatgggcggttgcagggctgtgatgttggaatttggcgtttatttttagatattgttcaccttttatcaatggacatgcccttctttcgccgttatgtctgcctgtatgtgcgtaagtgtgcgtgcatgtgcatatgtgcatacatactgacgcacagtcgcgggcagcgaactagtgccacatgtgcaagttgcaatattttcaaatctcaatgattaataacttgttatttgtgaaaaatgaaccaactaagtatttgattacatagtttgtggtttccgcgcccttattttctaaccactttacagccagataacaaagtttccatgacacacctactgataaaagcaattgcaacgcctaaaatgagc

SEQ ID NO: 42716 - DNA, 2863 bp, DROSOPHILA
cttgggtgtggtgttttgtttgagtaattgtttttgcagatagatctttttagttaatacacttattaatattcttatatcccgaatatggctagcagcctcgtttttgtggctctagtcggcgccttatgttttacgctcgctaacgcacaacatcactacgatgagcacaagaccacacggatggtgtggtgcaccaagagccaggcggagcagtacaaatgccagaaccttacggtggccatcgagcgggatcgggcactattcgacgaggtgttcctcaatctcacctgcttcatggcctacagtgcggatgagtgcatccatcacattgatcgcgagaaggcacacatcaccacgctggatgcgggcgatgtcttcactgctggacggtacaactccctcatacccattatgcaggagaaactggagggcggctttgcggactatcaatccgtagccgtgatcaagaagggatctctaccagacttgaacaatctgcgcgacatgcgcaacaagagggtgtgcttcccctgggtgggcagcttggccggttggattgtgcccattcacacgctccaaagggagggcggcatggaagtggtggactgcaacaaccaggtgaagacggccgccagctatttcaataattcgtgtgctgtgtactcgctttccgacaaacacaatccaattggcgacaactccgataaactttgtacgctttgcactggaaagatacccggaggacgctgctcatctgcagatccctacttcggctacgaaggcgccttcaaatgtctgcttgaaaaaggagatgttgccttcttgcgccattcgactgtgaatgaaatgctgcaaaccaccgaattcaagaacatagcacccgacacttttgagctgctgtgtcgtgatggtcgtcgtgcctccatcaacgattatcgccagtgtaattggggccaagtgcccgccgatgccattgtcacatcttcggctcgcagcttcagcgatcgcaagcagtatcagcagtttttgaagcgcattgccgagctgtactccgatggcacacgtgatgatcagagcaggcagggaggacaaagcttcaacagccgcaacaacatcaacgatcagaatgcctatggccagttcgataataatgatccgtacagaacgcagaatcaatacgatcagtatcgcagcgaacgattggacagcagttttgcagaggaaagaaaccagcaggacggcacgaacacttccatactctatgagaagttccgcatcttcgagtcgaagcgctatggcaagccaaatttgctgttccaggattctagtcgcgctctaaccgtgattcccgaagatgatcagtcatttaccaagtacctaggccctgccattaactttatctacggcatccgtgagtgtccagttccagcgatgacgctttgcgtgacttcggagaatgagcttgataaatgcatcaagatgaggactgccttgaaagctcacctcctgaaaccagaactcatctgcaagaaaatgcactcccacatcaactgcatgcagttcatcgaagcgggcaaagcagacatctccgttttcgatgccggcgatgtctacactggtggcctcaactacgacctggtgcccttcatgtcggaggtgtacaatctgggcgagcccgagtattatgtggttgccgtggccaaggaggatgatcccgatacggagctaacttacctgaagggtaagaatacctgccatacgggcattaacaccgccgctggctggacatatccgatggcgcttttcatctcgaacggctggattcgtccctacggatgcgattcggttcgagctgccgcggagtacttcaccaagtcgtgcgtgccgggtgccattagcaatgagtacaacaccggtgtgccctacgacagcatgtgcgatctgtgtcatggaactagctatcgctattgtcgtcgcgatgcctccgaggaatactacgggcacacgggtgcattccgttgcctcgtcgagggcggcggtcacgtggccttcatgaagcacaccacggtgatggaaagcacgggcggcaaacgcaaggaatggtgggccaggaatgccctaaacgatgactttgagctgctctgcacggatggtactcgtgccgagatccaggactacaagcgctgcaatctgggcaaggttaaggccaatgctgtggtcacccgcggcggagtcaactacaacgagacccagatgaatgcctacatcaatctgctgacctatgcccaacaactgtacggtcgcaaggaagtggacgccttcagtttcagcatgttctcctcgccgatcgggcactatgatctgatcttccaggacgccacgcggcagctgcaagtaattccgcccaataagcgcaggtatgatgcctatttgggcagcgattttatgcgagcacgccgcatcaccgactgctatgctggtgcctcccagttggcattatccgtgggcctgctcctcgtgggttcgctggttgcaatgctctaagccactagactcacttagatttcagaattctacaagcatctctagcacaaagagaaaacatatcaacatttttacattccaaatatgattaagttaaatgtgaaatcccttccgtccgaaaatgaaactctaactagccgaaaaatatctgttgaaggctatagtttataatttataaagtcctgtgccttattatagtatttgtttgtgtacataccaactaagaccgtccaaaaaatgtacctaggagatgtaagccgaatcttttacaaccgcttatgtaagtatacaaataaaataactagataaaggagtt

SEQ ID NO: 42717 - protein, 819 aa, DROSOPHILA
MASSLVFVALVGALCFTLANAQHHYDEHKTTRMVWCTKSQAEQYKCQNLTVAIERDRALFDEVFLNLTCFMAYSADECIHHIDREKAHITTLDAGDVFTAGRYNSLIPIMQEKLEGGFADYQSVAVIKKGSLPDLNNLRDMRNKRVCFPWVGSLAGWIVPIHTLQREGGMEVVDCNNQVKTAASYFNNSCAVYSLSDKHNPIGDNSDKLCTLCTGKIPGGRCSSADPYFGYEGAFKCLLEKGDVAFLRHSTVNEMLQTTEFKNIAPDTFELLCRDGRRASINDYRQCNWGQVPADAIVTSSARSFSDRKQYQQFLKRIAELYSDGTRDDQSRQGGQSFNSRNNINDQNAYGQFDNNDPYRTQNQYDQYRSERLDSSFAEERNQQDGTNTSILYEKFRIFESKRYGKPNLLFQDSSRALTVIPEDDQSFTKYLGPAINFIYGIRECPVPAMTLCVTSENELDKCIKMRTALKAHLLKPELICKKMHSHINCMQFIEAGKADISVFDAGDVYTGGLNYDLVPFMSEVYNLGEPEYYVVAVAKEDDPDTELTYLKGKNTCHTGINTAAGWTYPMALFISNGWIRPYGCDSVRAAAEYFTKSCVPGAISNEYNTGVPYDSMCDLCHGTSYRYCRRDASEEYYGHTGAFRCLVEGGGHVAFMKHTTVMESTGGKRKEWWARNALNDDFELLCTDGTRAEIQDYKRCNLGKVKANAVVTRGGVNYNETQMNAYINLLTYAQQLYGRKEVDAFSFSMFSSPIGHYDLIFQDATRQLQVIPPNKRRYDAYLGSDFMRARRITDCYAGASQLALSVGLLLVGSLVAML

SEQ ID NO: 42718 - DNA, 3220 bp, DROSOPHILA
ggaaataagacataagatatatcaaataaaatctcctctaaaagagatgagcttaaagtgatgattgttattaatatttggacaaaaaaaaaataaataaataaataaataaataaagtaaaatgtaaagtaagagattgaccgacaaaaggctttcaatttgaaaatggccgttaaaatcatgttttttgaacgaagtatccgattaggctgattgccagattgggtcagagtgcaataggtggacatgtggctccaccatcctcaaaagcttcaacagccaaaaatgtaagtactcttttaaaaatgcggtatgaagttccaaaaaattttgaaatatctttcatagtgataaagtcgagaaccgcaagaatagaagggcatacccttctctataaagtaccttgcgtaccagaaggcgtttgccttggtacatatgtaagaagtgattagatttgatgaatctctaatgaagatattattttaatactgtactaaaaatatgatatattgaagataactaaaacaactatttttgatatttttgtagtttattgctttacatcagtacatacatacacacttttaacaatattaattttaaagaatttaaatccggctataaagaatagaaagctaagaacacagcaagtttttcaaaggacaaatgcacgtttttgtgttataattgaatagaaaattgttttgatttggactcaaaaattgagctaggttggcaaaaacagtcgttgggcgaacgtctgcccatatccccagcccacttgtttacctttggtccgcccgcctaatctgtgtttgtctcccagccagccgtccacgcttttttccacactctgctgattaggaagccatctgatctgggtacatctagtactcgcgtatatgtatttagcaaactaaataggtctaggtctagtcacacgaaacagctttcgcattagcgacaaggctgctatcagtgaccggagttctctcccgattacggctttatgttgaggccatcgacgtacttgcggatcgccaacacgtccgtcggatagacccggcaacagccgccaacgatgcgcactcccagctggatccactcgggcacaaacttgaccacctcctcgccggttccagtccaatctccctgctcgacgtcgtagatctcgccgcgattgctgtagaccaccagtgggatgcgatccgaaccggccactttggtaagcgatgatagcaaaggggtcacgaatagtgggtttacacagttcagaccgatcccaaggagccggttctcagccttccgactttggaccaaccgccagagggagagagccgcctccgcgaagttttctccactagccatgtgcttttcatcctgaaaatatcggaacataaagtggatttttaaatgtaattgaacgatatattttttacccttgttttgtataaagaatgttattgttttttgcgatattactcaccatgcactgcagggagacccagaatttggcatccggaaagttgtccagtactaattcggtgactgcctctgcctccatcagacatggaagtgtttccagggccaatccatccactccagctgcgagacaaatctcaattcttgtcttgtgccacgccctcagctcctccttggacatcttgtccgcatagttgccggtgtactcagatccatcgtggagataggcgccatatggacctattgagcccatgatcagtggaagagccgactccgcttcagaaccgatttcgctaaggtactgttcctttgcctgcttggccagttgaacgctcttttggatcaactccacacctcgttctctggtcacgcccaggtacttcacgaatccctcgacgctggactgatacgtgttggttagaataatatccgctccgttgcgaagaaagtccagatgtgtttggatcacagcttccggattggtggcatcgaatcgcgatccccacagtggatcaccgtccactttttcggtgacattcttggccaattgcgaggagaatcctccgcatttgaccagaattggcttggtgtcccagttccatttttgattcacttccatgtcttcactgctgtacgttttccgttaaactgcaaatttctggaagcgtacaatgcgatacgacaaaatttcgtatctgacagatacgtgatattgtaagtattgccgacttggaatttttgttatttttgtcggattttttcgcttgggctggcaactttttccgcttatcttgtatgagtttccacaacgcaaaaacctacacataccctaacacatctcagctgttctttgtttacgagtgcagtgagcactcgataagttggaattctaagaaatgtgtcttgaattttgtagctagctacatagctacatataatataataaaataataatatagttatctaataaagaatcaaagatgtttcgaaacaagtaggaatcaagttatgttcagttcctactgtaaaaatgtaaaaattcaatggcatttaatgtcacaaaggtactaaaatagcaacaagcggttgacgagaagaaaaacttgtatgaggtacttaaccgcaacattatatatacatttttttcgataagcaacagatgtctgtgcattatcttttgtctagaagcaacccaacagctgatacagttgatgatatacaaatttcattcgcttaggagagggcggcaagtttgttgcgttttcccaaggaaaccaaagaaaacactgaagtaaattataaatacaatatgcatattttatatagtcgagataatacataatgcaaaacaattggtgtactaacataaacgcgtatgttattcgatacggatagaataattaattcttaaataccttggtgtgttagtgaatgcaattggcttaggtgataaattgttttttttttttttttggttgttattgggtgtgggtgtataatcacatagttttgtataaatatataattcatgaaatacttcaagctgaaaaatgccacaaaaataaatgtaactttggtaaacttacgcactgtataaattctaaaacatgtttcgcttctaaaactagtttaaatttttgcactaaataacagttataggtattgttcttgttgtgtgtataatatgtatgggtactagccactttttaacattgctacacgcgaataaatactata

SEQ ID NO: 42719 - DNA, 1114 bp, DROSOPHILA
aattccaagtcggcaatacttacaatatcacgtatctgtcagatacgaaattttgtcgtatcgcattgtacgcttccagaaatttgcagtttaacggaaaacgtacagcagtgaagacatggaagtgaatcaaaaatggaactgggacaccaagccaattctggtcaaatgcggaggattctcctcgcaattggccaagaatgtcaccgaaaaagtggacggtgatccactgtggggatcgcgattcgatgccaccaatccggaagctgtgatccaaacacatctggactttcttcgcaacggagcggatattattctaaccaacacgtatcagtccagcgtcgagggattcgtgaagtacctgggcgtgaccagagaacgaggtgtggagttgatccaaaagagcgttcaactggccaagcaggcaaaggaacagtaccttagcgaaatcggttctgaagcggagtcggctcttccactgatcatgggctcaataggtccatatggcgcctatctccacgatggatctgagtacaccggcaactatgcggacaagatgtccaaggaggagctgagggcgtggcacaagacaagaattgagatttgtctcgcagctggagtggatggattggccctggaaacacttccatgtctgatggaggcagaggcagtcaccgaattagtactggacaactttccggatgccaaattctgggtctccctgcagtgcatggatgaaaagcacatggctagtggagaaaacttcgcggaggcggctctctccctctggcggttggtccaaagtcggaaggctgagaaccggctccttgggatcggtctgaactgtgtaaacccactattcgtgacccctttgctatcatcgcttaccaaagtggccggttcggatcgcatcccactggtggtctacagcaatcgcggcgagatctacgacgtcgagcagggagattggactggaaccggcgaggaggtggtcaagtttgtgcccgagtggatccagctgggagtgcgcatcgttggcggctgttgccgggtctatccgacggacgtgttggcgatccgcaagtacgtcgatggcctcaacataaagccgtaa

SEQ ID NO: 42720 - protein, 331 aa, DROSOPHILA
MEVNQKWNWDTKPILVKCGGFSSQLAKNVTEKVDGDPLWGSRFDATNPEAVIQTHLDFLRNGADIILTNTYQSSVEGFVKYLGVTRERGVELIQKSVQLAKQAKEQYLSEIGSEAESALPLIMGSIGPYGAYLHDGSEYTGNYADKMSKEELRAWHKTRIEICLAAGVDGLALETLPCLMEAEAVTELVLDNFPDAKFWVSLQCMDEKHMASGENFAEAALSLWRLVQSRKAENRLLGIGLNCVNPLFVTPLLSSLTKVAGSDRIPLVVYSNRGEIYDVEQGDWTGTGEEVVKFVPEWIQLGVRIVGGCCRVYPTDVLAIRKYVDGLNIKP

SEQ ID NO: 42721 - DNA, 12808 bp, DROSOPHILA
atcgcgatccccacagtggatcaccgtccactttttcggtgacattcttggccaattgcgaggagaatcctccgcatttgaccagaattggcttggtgtcccagttccatttttgattcacttccatgtcttcactgctgtacgttttccgttaaactgcaaatttctggaagcgtacaatgcgatacgacaaaatttcgtatctgacagatacgtgatattgtaagtattgccgacttggaatttttgttatttttgtcggattttttcgcttgggctggcaactttttccgcttatcttgtatgagtttccacaacgcaaaaacctacacataccctaacacatctcagctgttctttgtttacgagtgcagtgagcactcgataagttggaattctaagaaatgtgtcttgaattttgtagctagctacatagctacatataatataataaaataataatatagttatctaataaagaatcaaagatgtttcgaaacaagtaggaatcaagttatgttcagttcctactgtaaaaatgtaaaaattcaatggcatttaatgtcacaaaggtactaaaatagcaacaagcggttgacgagaagaaaaacttgtatgaggtacttaaccgcaacattatatatacatttttttcgataagcaacagatgtctgtgcattatcttttgtctagaagcaacccaacagctgatacagttgatgatatacaaatttcattcgcttaggagagggcggcaagtttgttgcgttttcccaaggaaaccaaagaaaacactgaagtaaattataaatacaatatgcatattttatatagtcgagataatacataatgcaaaacaattggtgtactaacataaacgcgtatgttattcgatacggatagaataattaattcttaaataccttggtgtgttagtgaatgcaattggcttaggtgataaattgttttttttttttttttggttgttattgggtgtgggtgtataatcacatagttttgtataaatatataattcatgaaatacttcaagctgaaaaatgccacaaaaataaatgtaactttggtaaacttacgcactgtataaattctaaaacatgtttcgcttctaaaactagtttaaatttttgcactaaataacagttataggtattgttcttgttgtgtgtataatatgtatgggtactagccactttttaacattgctacacgcgaataaatactatattcaaaaaatacagatattggttatttttggaaccccacattaaaaacggaacggagaaaagcttaaacgaaatgtcaacataatttgaaacactcagtctcaggtctccttgatggtctcgccccactgtccacattatgagaacaagttgttccgtcgcttgagggagccgaacttcttctccgcctcgagtaacatcttttcgtttctaaccacctcgaagggaatggtcctggacagacgatccatttcctgatccgagggaaagtcctcaaagctcatgttgctgaagccggttttggcagaattttgaatggtgtttgattggaaattgcggccgcctccagcacctcgattctcatcctgatcctgttcgtcgtcgtcatcatcgtgggactggtactgcaatcgctggtgcttctgcttgctgccggaactaagggaactggtggatccaagggcagccgcgcttacttttttgtacgaatgcccctttaccttttgggtgagctttcccggcagaacccttacagccagattggacttctccttcttgggtttcgcaggggtaggtataccgattccgtctgccaccacatcggcatcacgcaacaccacgggttcctcctcgtcgtccggtgtgaaatctgagcagcgatcttgggagatttgcacatacgcattatcggcaatgggcagcaaaggacgcagatgggtaacgaccgctggtattggaactggaacggctggaacggaaacaggggcaggaactggaactggaagaggtgcctgaactggaatcacagctgctggtgaggattgtggctggttaatggagcaggaactggtgctcatgctggagaaagacggcacattcacatagacactgctggtgccactcgacttagcagtctggttattattattattattatagttcatcggtggctccggcgttttgttgataataatcgagtgatttatggtcaccagttgtggggcagacgaattgacggaaacagatacaggaacggaggcaggaagagcaacagatacggaggcgggcactttgatcacattgttattgttgttgtggctgggaaattggtggatctggtggtgctgtgggttctgttcgattgtacgaattacctgtggaaatggttccaagccgaacaggtcgcattgattagtttcccctgattgcgtgttctgtgcgttttcctggaagggattgaaaattggctcattgaactcatccagctgcgcagagttccccacattattggttggcgtgagctgcgctggaaaactggcaaagttggtagaaggatctccgacagcggcgcttttaactggcgttgaagtccacatctcgggttccgaaggcttgggcttagctttgggtttagtctttcgtttcaaaggaactccgactggtaatttaaatggagccagggcgaacacatcctcctctgattcctgcacatcgggatttgttggcagaattggagccacaggagattcagtgctactcttgctttctccagaaccataatccaattcatcatctagcagcaacggacgatcgccgaacttgtgcaagagatcgctcgaagtgggacttagttcttcagacggagcacttgggtcgccagtggcagtcacaagggcacggtccttcttcctcatccgcaccttcaccaccacccgactacgcacatcgtcttcatgggtggtcacactttcacattctgcatggtaggcagagctgctacaggtcttcactgactcgcttattccatccatttctgttggcagaggacgacgttgcttggcttgtgtctggcgaggattctcgtcaaacagatcatcatcctctgcccgcaggtcactggcagatccgatcgaatcaccgtcggattccgccgccttggcagcttcttcagcttgtgcagctaccgcggcagccatgagatttagttgttgggccgcttgatgggcagctgttgtgggtttcttggtcttatcgcgaagtttcttcacaattggcagatgagctgtcttgtccaccttgtgataggcaacctgttggattttatggatggtttccggcaaattgcttgtcaccatctgcatttgcctaaagatgcccccacctccttcatcgctgtcttgttgaaagaactccgaagcctcggaatcggagtcatcggaagtcggctgatctttgctgcgcagcttctcgtacttgttgcgatcttctacaggtagcttaacataaccagagacaccttctccagctcctccaacagcgcctggaattccacattctgagtctgttttgagtttactgataagcgaggtcttctcttcgctggaaacctccagggtgggggagagcatccacttggatgagttggaagaggtggcggtgtttgctcctcccgctaccaagccgataggcgtggccactccgcctcctgttccaccagatgaaacgccgatgaatttcgctgtggacgagagcgaaggacttttatgcagtaaggtaatgagattacgggtttacgggttagcggcagtttgttctacaactaattatggatgataaatgtgagaacacgtggttgttatcccctggaatgtaatatgttaccaagtgatttatgaatgctttatgctcaacgtgacgtatacgtaatagtttggttagttgaatgacgaaggcgacgatagaagctggaatacgttaaaatcttgatccaacaattaatttgggaaattatgtgttgatttggtggcatgcacaactttcatcttacattttgttgtttaattgggcaaatgccaattctagagtttataacttcaaatgttttgctgtgcatgccaaatcaatgacttatcatagtgcagcccataaatttagttagctcgatttacattttgtgaatgttcagtttttgaaacataatatagagtttattgcagttttgcttcagttttggtttaaatctcatacaattctcgtggctgagcttaagctaacgccccttttttaattggtttgtataaatatatagtgctttatgtatatatagatataatctgtatttgctgtcatctgataatctggttgtatgtatgtgtcttggttacctgacttttgttgctttcattgcgcttatcggttgctcattttgagtaaatctagttactaagtgttagctctttggtttaacgcttaaaggggttttctcccattggcttaattatttacagtattaacaagagtagtaattaaagctaattgaacatttcaattggtgtgtctgtgtgtagagaacaaaagtgatcaatttggacaattcggaaaacattattggactatctcgagcttgatcgtacatatgtatattgtcttgcgttgattggactctctcgtagtgataattaacaattgtttggattacttttgtttgtttgtctgctgccaaatccgaagagattggagttttatgcgaacttcatcgaaagcagaattgaaaaacgatcagagggtacaaaattttaatagtttgctgtcgtgtttagctttaatcagatctacagatccataataataataatctttttagcattaatttttagaattgcacgtttaacacatgtatgtatagtatgtaataactctgatatgcaaattattgccaaagaattaaattgcttcacactctacgccaacaacatgaataaatagttctagttcttctcttagatagcttaatttacaattacacacagagtagatacattcactaataagccaatgaattgtacaatacaaataattgaaatttgttcttttgattggttagtttttgaaccacaaccgctaatttattaccattaagaactaaattaacttaatacctagatataatatattcaaatatatgatttattagttttgggttggttttctgataatttgtatcaagcacagtaccagcaccaagtattacttttttagaagcgcgcagattgatgatggttacggaaatggagggacgggaaaaaagttatttcttttcgaaataaacaaaagttaataacggaatttgaatatttaccaaaaaaaaataaaacttttcatgacgaaatataattttatgggggtataatttttggaaaacataagattggtggtatttttcaccaaataggtttaaggatttacagctcactttgaagaaaacatattaatcaccgaataaactcatatgacaaaagataagaaggttcgtcgagatatttttggttggttagtaggtgcatggggtatttacaaattgattgattgcacttaagtagtattcgcgggtcattccccatctatatggcacgctaaatttttcgatcgagcagcgatcggctagtatacggttaatttattgctggagctgatcgaatcttacggcggctgccgatgtggtctggaagcggctccttggatggaggatatcgaggagatcgccttggcggcactttgctgagttgagcatagcgttactaggaagtttttagactacgtctacgtctacgttcaaatcactttcactttctggattgagattgagagcgaacaaaagcgacaatcggaaaactaaacgtattctggcattgcaaacagttaaggtagaatttcatgctttacctccggttttgcgcagcgagctcgccttctcgcgcagtccgggtggcaaactgaatggcgccgatccgaatggatcctcggagacctgcgacgggtaaggagacacagcggcagcaatcggcggaggaggcactgcaccaggagcagctgtaacaggagccacaaccgcagagggaatctgctccgttggtgttagcgtggaagttgtggatgccgattttgctgtgatgcctgaaagcattaaagaagttaatattgcggcaaaacgctctcttccaaaacgtacttccttgactgcctctctgtcgtatcttgtcgaactccgcctcaaagatgtgatcctcagtcatctggctgaaaggctgctcctcttcgaacggattccaggcttcaactcgcttttccaccgccgtttgtcctggtttcattaattcgctaatggataccgcggctgagtttgccgttgaagatgcatatatcccgggattcgaggcagcactagccaaagtctgctgaccgtcgcccatggcagccaagttattgttaaacggagccagaaactgacttgtctcattggcaaaagttctggagcgcaacaaaacaaatgaatgattagatgatcagcgagtgatggaagaaaattaataataaggaaaaagagcaagcaaagcaggaaaagtaagtacgggaatgcaagagatcttaaggctacaatgaatctattgactctgtggctcatcggcctcatcctggtcacttgtagctcttaaggatcgggaattcacagaaagagacaagcagagagtgagtaaaagagcaagagaagagcagaacacagaacacatacagatcgtgcaggaccaacgcatttggaaatgtctaacatcaagaatatttaaatatttatgaaaccatatatcttaattttcaggctgaaacctttgggggaaagcaattatattgattctggccgagtaaactttaaaaacgataacaagacacaacttttgtgcttaaacaggtaactaagataggaattaaaatttgtagaatcaaaatgtgtattcttgattttagattagcttctgttttcttgtatgcaacttacttattgaaggccgaggtgtcgcttacgttacgcctatgaccacctcctccgcttggcttgggcggtgtcaacatgctcttggtgggcgtgcctgcaatgacgtttaagtcctgaggcacttcctccttgttaggttcttctgctgctggtagaaattcagtaggaattactgctgcagctggctcattgaatggatctggatagccacttgactcgaagagtttactggcagcaggagctgccggagtaacagcttgaggaggtggaggaacagcaggtggcatagctgggaagttggcctggaactgctcgaccacaggttgaggttggggttgtggagaagtgatattctgtcttggcgagggactgggaggcaaaccgagacccaatggatttcctccatgtaccgatgaggaacccttaggacgagaccgaggagctacactggttcccgcctccacaactgacacattctgagccttcgccgccttggaggccgctgcactgatcctcttggcttccgattcaaacggaggcactaccagtaggtcgaagtttggaatgggagttttctgattaaaaataagcaaacagattatcatacaggaatctgaacacaaacattatgcatcactcacatggagattctgaacgggattatccttgcccgccagtcgaaaggccacctcgcaaacttgccaaatgtttggtcgcttctccatatcgggttccaacatatatttaatcagttggtgcatgcccttcgagtactttgaggagtctggaatggaaaactgtccattctggatagccaaagtgctctccccaaatggcaaggaaaagaagcacagcttatagagcatgcaacccagtgcccagatgtccgcctttgtggttatgctcttgcccccgtacaggtcgatcatctcgggagcccgataagatagagtggtgtacttttggatctcttcctgcaccacggtgactccgtgctgttgaggatttaacgtcttggccgttgccgatccgaagtcgcagagtacgaagttgcccgcgtccgtttgcagaatgttctccaccttaagatcccgatggataatcggagtctgacaatagtgcaatcgagagacagcctcggcaatatcacagaagatgttgagcacctctggctccgtgaagccaacgtgcaatctgtggcgaatttcattggattacattcgaattccgcaatcaaatggactacatttttagattcacttcgtttacctcgcattcatcatggccagcatgtgatgcttgcaatagggcatcaggagtagcacctcgcacaccccgtttcccgtgggcgtgatgctggagtccacataaccaatgatgtttttgtgcccactcaggttgctctgggggagtgaaagtgattgccctattagattaggtttgtttgtcccgatttatttactcaccgcaatctgtatctcccgcttggctacgttcagatcgtgctcattgttgacgtacatgcgcttcagggcgtacttggtcgccgaggaactgcctccgccgttgccccttgccaaaaagaccatggcgaaaccacctgcgtgagttttgaagagatggggaagagaaaaacagagcattagagcatggggtaagttgacgggctagacatccataacagctgtcagctgtaaacaacatagcatatttgaatgggggaggaaactgcgagtaagctaaacccgatgaataccctgttattgtatattcataatacatatatacgaatattttattttatatggcaggaagtagctaattaataaactaatttgtttattaaaaggaaatatgtgtcacatttttatagcacacgtatctttggccattccttcccacataatttatgccatatatctacgtgataataatggaatttctttactataaacatttcacgttcacaaatatccccccgtggtgttaaaatagtagagggtacccgaattcgagtgatagcagttactgtctggccatggaacgatttacacatgttttgcctaacaggccatttgcatgaggtttatttcagtttattgcaaatagaatttcaagtagaatgcccccacatttcagccctctccacctgtcgctttacgccacttcaaaatgtacgataaaaaggcaacgcaatataaactaaactattgaaggtcacgtacagaaataacaacaataacatgcgacaataacaatactcagcgggggaaggcggtggggcggcaaaataaaaagataggaacagtggtcactaagaaaaaaacataaaaatatatattagatataaaatgaaatgatattagaaaaaaaaatgatctcaatacattagatgcatagacgatgcaacgattaggagaatgttttaatattgaaaatatttatggaacatttgctgtaaatgcacacaccatttctccctgtgtaggcgatagagagaagtgaatagcggaccagcaaatgtaaccatttttgctcgactttgtgaaattatggcgtcaaatgttaatcaatgctgaaggttgcaacagcaacaaatcaacattggcaaaaagtacagcaacaacatccagtaataatagtatgaaaagcaacaataacaatgcacaattgtagcgatgcgagaaaacgcgagaaggcaattcgaaacgcaaacgagggtagaaaatacgtctgaaggggcgtcaactgcaaggtgggcagtaagcggttaagggtgggggctgaggggttaaggcgggaaagcttcattcgttaaccgtttgtcgcttagtcatttgtaattgttgttggctgctcaaaaatcgaatcaaagaaagcaggtaaatattgaaggtgattaagcacagtgttactttggaagtatccagcatatcgagcagtttaaacttggctatacgcgcattttattcattgagcatctgcaaaagactctatttattttttctctttcttaaatgaaataccaatagttacgttactggattaaatgaattaataaataatatataatttagtttataatttgttatactaattcaataactttaaccaaataaccgtgttcgtcaaacgctccgcctttttaattacagggtatgcccgacaacagctgactaattgccagcggcgccagcgcagcgcaaaacaaaattacgaatcgagtccgcttgccaaaagtataaaaagtaaaaaacactacgtaatggctaaaggaaaggtggcgaatggctggccaggcggtgggtgagcaatcgttagatgatcaaatgttgggcggagggtactggtgccaggccaacaaggaggcacttgcactgcaggatgatgtggagtggagcactccgcatttcaaggacaaggacacagcacaggcgatttccttaggggcgaactttgccatttagctcggcgaaaggtgaaaaacggaagactgtcggagacagtcggctgatgagtgttggtcttgccgcttcattggctaaattaacataattgattcaattgatttgtggccatgtgtagtggctacgggaattcaatgggtattccatggaaaaaccaaccagaaccgtaactgtgtttgtacagtcgggtttctctaacgcggacacccatttgtcacaatagaaatgctggcatttctggttttggcaaaaataaactctttaaagactgacataaatttggacgaaatatctgcacgccattagagagccgagttatggacataaatatgtagttctatgccaagggcaaaattgcagttcaattagttggaatttaggttacaaaccagtatttagtattcataattaatgaaataatttaaaatgttttacagttttattaaaagataatatatcaaagtcagattttagctgttttgagtttaacatcttatacagaaattattgggagtaatttatttggatttaatcggaaatgcgacaagtggtgtccccaattatggaggatacgcagctgatttttatgctctctagcgctttgagtacgccccacatttgggagttctcgcgctgaaggggtttatctaatctgtgacgaggggcgagaccgaaaagcggacggcaggctactgcccacctgtaaatcaggcaggtgataagcataatcgcgggcgacgtgttgtaggtaggggaatgggagcacatatataagagtgtatatatagtcgtctaccttctgccaggacatcctccacggtgaccgtgacgcgtcccactgtgaagaccttgcccacgaagctgttcttctcgttcgaggacgacgagctgctgctgttgggcggattctccagtcgagagttctcattgcgctcgaacttagacaggattttcttcattttcccccgattttcactagaaaatgtttactgccccagcagcacaacacacacacacacactcgcgagcacacacgcacactagctaacacggtcttaattgcctgcgcgtaggtgtttttggcaatttttaattttgcgagggcggctgacggtgggcggggcgtcggtgccgctggccaattaatccactttcgagtcgtatcggctagctgaataaagctattctgcgcactttgtgtttttgcatgcacacacacaatgcagtggaaaaagaaagttgttcgattttcctgctgctctcgagttgttgggccagtgtgaccagggcgctttgctgcagtcagatgcgcaacccgcggctggtgcagccgcctatcgatatatagataagttggttgcaatctcgaaattctgaaaacaaggaaatccccgtttacaaaataggttttatgataacaattttttgtaatttgatccaatttaaaaagataatatggttctactttcaataaaacatatagctacagttgcattaaactatcgcgcagttttaattagctatgctgccaacatcgtgtttcccttatcaatatgttatcgattgtgctggtgcaattgtaaacaagcatctctagcaaatggtcgctaaattcgcaaaattgtagtttgctgggataacaatgataaatacggccaagtactttgctcttctagagagtttaaggtttagtaaagctctaggtaaattggttaacatcatataataattgtagtatccctaatactaatatttcgacagcaaatacggcgaataactcagggactgccgaagccttggaaatcaacctgcgaattttggaaaaatatgctaaactcgagattggtcagcaattgcatgagctgtgcctggaatatcagttaacagacgatcacgaatctagtattgatcccgattcggatcgtactatatgctatataataagattgcaacatgtgctacattcgatcatgaggaacattaatttccacagcgacgccaaggaggatcttatttcggtagcgcacctgaaattgtgtatccaggcttcccaagaattatcatattactcgcttcgatgccagctacatgaggatttctacaagtcgcccatcttttgtgaggctcaggggaaaatcaaagctaacttttcattgatgcttctaagcattcagttctttattaatctactgcatattcgacaataccacatagccaactcgatggagctggtgcaaagggatctactggcggccattgtgagtctacgt

SEQ ID NO: 42722 - DNA, 5075 bp, DROSOPHILA
acaactcgagagcagcaggaaaatcgaacaactttctttttccactgcattgtgtgtgtgcatgcaaaaacacaaagtgcgcagaatagctttattcagctagccgatacgactcgaaagtggattaattggccagcggcaccgacgccccgcccaccgtcagccgccctcgcaaaattaaaaattgccaaaaacacctacgcgcaggcaattaagaccgtgttagctagtgtgcgtgtgtgctcgcgagtgtgtgtgtgtgtgttgtgctgctggggcagtaaacattttctagtgaaaatcgggggaaaatgaagaaaatcctgtctaagttcgagcgcaatgagaactctcgactggagaatccgcccaacagcagcagctcgtcgtcctcgaacgagaagaacagcttcgtgggcaaggtcttcacagtgggacgcgtcacggtcaccgtggaggatgtcctggcagaaggtggtttcgccatggtctttttggcaaggggcaacggcggaggcagttcctcggcgaccaagtacgccctgaagcgcatgtacgtcaacaatgagcacgatctgaacgtagccaagcgggagatacagattgcgagcaacctgagtgggcacaaaaacatcattggttatgtggactccagcatcacgcccacgggaaacggggtgtgcgaggtgctactcctgatgccctattgcaagcatcacatgctggccatgatgaatgcgagattgcacgttggcttcacggagccagaggtgctcaacatcttctgtgatattgccgaggctgtctctcgattgcactattgtcagactccgattatccatcgggatcttaaggtggagaacattctgcaaacggacgcgggcaacttcgtactctgcgacttcggatcggcaacggccaagacgttaaatcctcaacagcacggagtcaccgtggtgcaggaagagatccaaaagtacaccactctatcttatcgggctcccgagatgatcgacctgtacgggggcaagagcataaccacaaaggcggacatctgggcactgggttgcatgctctataagctgtgcttcttttccttgccatttggggagagcactttggctatccagaatggacagttttccattccagactcctcaaagtactcgaagggcatgcaccaactgattaaatatatgttggaacccgatatggagaagcgaccaaacatttggcaagtttgcgaggtggcctttcgactggcgggcaaggataatcccgttcagaatctccataaaactcccattccaaacttcgacctactggtagtgcctccgtttgaatcggaagccaagaggatcagtgcagcggcctccaaggcggcgaaggctcagaatgtgtcagttgtggaggcgggaaccagtgtagctcctcggtctcgtcctaagggttcctcatcggtacatggaggaaatccattgggtctcggtttgcctcccagtccctcgccaagacagaatatcacttctccacaaccccaacctcaacctgtggtcgagcagttccaggccaacttcccagctatgccacctgctgttcctccacctcctcaagctgttactccggcagctcctgctgccagtaaactcttcgagtcaagtggctatccagatccattcaatgagccagctgcagcagtaattcctactgaatttctaccagcagcagaagaacctaacaaggaggaagtgcctcaggacttaaacgtcattgcaggcacgcccaccaagagcatgttgacaccgcccaagccaagcggaggaggtggtcataggcgtaacgtaagcgacacctcggccttcaataaaacttttgccaatgagacaagtcagtttctggctccgtttaacaataacttggctgccatgggcgacggtcagcagactttggctagtgctgcctcgaatcccgggatatatgcatcttcaacggcaaactcagccgcggtatccattagcgaattaatgaaaccaggacaaacggcggtggaaaagcgagttgaagcctggaatccgttcgaagaggagcagcctttcagccagatgactgaggatcacatctttgaggcggagttcgacaagatacgacagagaggcagtcaaggaactgctcctggtgcagtgcctcctccgccgattgctgccgctgtgtctccttacccgtcgcaggtctccgaggatccattcggatcggcgccattcagtttgccacccggactgcgcgagaaggcgagctcgctgcgcaaaaccggagcgaaattcatcggcgtttcatctggtggaacaggaggcggagtggccacgcctatcggcttggtagcgggaggagcaaacaccgccacctcttccaactcatccaagtggatgctctcccccaccctggaggtttccagcgaagagaagacctcgcttatcagtaaactcaaaacagactcagaatgtggaattccaggcgctgttggaggagctggagaaggtgtctctggttatgttaagctacctgtagaagatcgcaacaagtacgagaagctgcgcagcaaagatcagccgacttccgatgactccgattccgaggcttcggagttctttcaacaagacagcgatgaaggaggtgggggcatctttaggcaaatgcagatggtgacaagcaatttgccggaaaccatccataaaatccaacaggttgcctatcacaaggtggacaagacagctcatctgccaattgtgaagaaacttcgcgataagaccaagaaacccacaacagctgcccatcaagcggcccaacaactaaatctcatggctgccgcggtagctgcacaagctgaagaagctgccaaggcggcggaatccgacggtgattcgatcggatctgccagtgacctgcgggcagaggatgatgatctgtttgacgagaatcctcgccagacacaagccaagcaacgtcgtcctctgccaacagaaatggatggaataagcgagtcagtgaagacctgtagcagctctgcctaccatgcagaatgtgaaagtgtgaccacccatgaagacgatgtgcgtagtcgggtggtggtgaaggtgcggatgaggaagaaggaccgtgcccttgtgactgccactggcgacccaagtgctccgtctgaagaactaagtcccacttcgagcgatctcttgcacaagttcggcgatcgtccgttgctgctagatgatgaattggattatggttctggagaaagcaagagtagcactgaatctcctgtggctccaattctgccaacaaatcccgatgtgcaggaatcagaggaggatgtgttcgccctggctccatttaaattaccagtcggagttcctttgaaacgaaagactaaacccaaagctaagcccaagccttcggaacccgagatgtggacttcaacgccagttaaaagcgccgctgtcggagatccttctaccaactttgccagttttccagcgcagctcacgccaaccaataatgtggggaactctgcgcagctggatgagttcaatgagccaattttcaatcccttccaggaaaacgcacagaacacgcaatcaggggaaactaatcaatgcgacctgttcggcttggaaccatttccacaggtaattcgtacaatcgaacagaacccacagcaccaccagatccaccaatttcccagccacaacaacaataacaatgtgatcaaagtgcccgcctccgtatctgttgctcttcctgcctccgttcctgtatctgtttccgtcaattcgtctgccccacaactggtgaccataaatcactcgattattatcaacaaaacgccggagccaccgatgaactataataataataataataaccagactgctaagtcgagtggcaccagcagtgtctatgtgaatgtgccgtctttctccagcatgagcaccagttcctgctccattaaccagccacaatcctcaccagcagctgtgattccagttcaggcacctcttccagttccagttcctgcccctgtttccgttccagccgttccagttccaataccagcggtcgttacccatctgcgtcctttgctgcccattgccgataatgcgtatgtgcaaatctcccaagatcgctgctcagatttcacaccggacgacgaggaggaacccgtggtgttgcgtgatgccgatgtggtggcagacggaatcggtatacctacccctgcgaaacccaagaaggagaagtccaatctggctgtaagggttctgccgggaaagctcacccaaaaggtaaaggggcattcgtacaaaaaagtaagcgcggctgcccttggatccaccagttcccttagttccggcagcaagcagaagcaccagcgattgcagtaccagtcccacgatgatgacgacgacgaacaggatcaggatgagaatcgaggtgctggaggcggccgcaatttccaatcaaacaccattcaaaattctgccaaaaccggcttcagcaacatgagctttgaggactttccctcggatcaggaaatggatcgtctgtccaggaccattcccttcgaggtggttagaaacgaaaagatgttactcgaggcggagaagaagttcggctccctcaagcgacggaacaacttgttctcataatgtggacagtggggcgagaccatcaaggagacctgagactgagtgtttcaaattatgttgacatttcgtttaagcttttctccgttccgtttttaatgtggggttccaaaaataaccaatatctgtattttttgaatatagtatttattcgcgtgtagcaatgttaaaaagtggctagtacccatacatattatacacacaacaagaacaatacctataactgttatttagtgcaaaaatttaaactagttttagaagcgaaacatgttttagaatttatacagtgcgtaagtttaccaaagttacatttatttttgtggcatttttcagcttgaagtatttcatgaattatatatttatacaaaactatgtgattataca

SEQ ID NO: 42723 - protein, 1460 aa, DROSOPHILA
MKKILSKFERNENSRLENPPNSSSSSSSNEKNSFVGKVFTVGRVTVTVEDVLAEGGFAMVFLARGNGGGSSSATKYALKRMYVNNEHDLNVAKREIQIASNLSGHKNIIGYVDSSITPTGNGVCEVLLLMPYCKHHMLAMMNARLHVGFTEPEVLNIFCDIAEAVSRLHYCQTPIIHRDLKVENILQTDAGNFVLCDFGSATAKTLNPQQHGVTVVQEEIQKYTTLSYRAPEMIDLYGGKSITTKADIWALGCMLYKLCFFSLPFGESTLAIQNGQFSIPDSSKYSKGMHQLIKYMLEPDMEKRPNIWQVCEVAFRLAGKDNPVQNLHKTPIPNFDLLVVPPFESEAKRISAAASKAAKAQNVSVVEAGTSVAPRSRPKGSSSVHGGNPLGLGLPPSPSPRQNITSPQPQPQPVVEQFQANFPAMPPAVPPPPQAVTPAAPAASKLFESSGYPDPFNEPAAAVIPTEFLPAAEEPNKEEVPQDLNVIAGTPTKSMLTPPKPSGGGGHRRNVSDTSAFNKTFANETSQFLAPFNNNLAAMGDGQQTLASAASNPGIYASSTANSAAVSISELMKPGQTAVEKRVEAWNPFEEEQPFSQMTEDHIFEAEFDKIRQRGSQGTAPGAVPPPPIAAAVSPYPSQVSEDPFGSAPFSLPPGLREKASSLRKTGAKFIGVSSGGTGGGVATPIGLVAGGANTATSSNSSKWMLSPTLEVSSEEKTSLISKLKTDSECGIPGAVGGAGEGVSGYVKLPVEDRNKYEKLRSKDQPTSDDSDSEASEFFQQDSDEGGGGIFRQMQMVTSNLPETIHKIQQVAYHKVDKTAHLPIVKKLRDKTKKPTTAAHQAAQQLNLMAAAVAAQAEEAAKAAESDGDSIGSASDLRAEDDDLFDENPRQTQAKQRRPLPTEMDGISESVKTCSSSAYHAECESVTTHEDDVRSRVVVKVRMRKKDRALVTATGDPSAPSEELSPTSSDLLHKFGDRPLLLDDELDYGSGESKSSTESPVAPILPTNPDVQESEEDVFALAPFKLPVGVPLKRKTKPKAKPKPSEPEMWTSTPVKSAAVGDPSTNFASFPAQLTPTNNVGNSAQLDEFNEPIFNPFQENAQNTQSGETNQCDLFGLEPFPQVIRTIEQNPQHHQIHQFPSHNNNNNVIKVPASVSVALPASVPVSVSVNSSAPQLVTINHSIIINKTPEPPMNYNNNNNNQTAKSSGTSSVYVNVPSFSSMSTSSCSINQPQSSPAAVIPVQAPLPVPVPAPVSVPAVPVPIPAVVTHLRPLLPIADNAYVQISQDRCSDFTPDDEEEPVVLRDADVVADGIGIPTPAKPKKEKSNLAVRVLPGKLTQKVKGHSYKKVSAAALGSTSSLSSGSKQKHQRLQYQSHDDDDDEQDQDENRGAGGGRNFQSNTIQNSAKTGFSNMSFEDFPSDQEMDRLSRTIPFEVVRNEKMLLEAEKKFGSLKRRNNLFS

SEQ ID NO: 42724 - DNA, 3269 bp, DROSOPHILA
ggcgggggcggggccgaaggccgagtgtggtgtggggtaggaagcaacatgtgagtaccaattggcgtgctgctgctgctgctgctgaggcgacagctgcgcctgctgatgctgctgctgctgctgttgctgctgcagggacatgggcgtcacggggggcgggtagtggtgggcgtagtggtgggggtgggcgtgatgggggtgttgttgtgacatcacggacgcggtgctgcctgtgtttatgctgcccactggtaagtgtcgcctgctttcggttcgccttgtggtatgttatcctgcggccaagttaggggcgcgttagctctctttttcgcaagcttttggcgtcttttatataccagtttttcatcggcccccgtctgtgtgtatgtatcgaactggcattgttgctattgtcctttagatttcgcattttccaactgccgcggcaactcacacatggcactctgcaacagctcggcaattgcacttaatattggctcgaagcgggcgaagggttttgaccattttacgctttatttcgctcccgaacgcgcgacgaacgaaacgtccagcgagacacaacaacaaactgtttgtggagcgcacttagcggtggggccacagtgaccagctatcgatagcagttctatcggtgtgggagcttttccatcgcatggaaagctttcgaaatcgaattcaattcaaaggattctacccaaggacttacactttgttctatcgaatcttactcacttactgcagtaacaaagttagaaacaatttttaatttcagttcttggtaaagttttcaaattgatttccgacaaagaattaaacacacaggatgctttataagaagtattcttcttgtcttactgcctttcgtattttgtagaaaaactaatttaagaataagaagtcagtttgcagtacatttccgctgctacaaatttaatttaatttcttaagccgctcacaaaactatttgcaataacaactaggtaatttttggacccaccaccccaacgcgctgtcttagcttctccttgacctgatcctcgtccgccaggaactgcttctcagccagccgcaccagggtcctccttagctgggatttcacttgcgtgatcttcgacgagttcatggccgatatggggacaatgctgtcgaaattgagcacctgtttcggacgcagttcctcggggcactgttcaagtccgctggccaaatcgctgacgagcggcttaactttggtaaagatctcgtgggcaccctccttgtccattttgttcagcagcaggacactgggcttctccagcagcgatggatcgtagagctccaactctttgttgagcgcatacacattggccaagcagtcgcgatgcggatgtttgggactcagctggaagccgaatatatccaccatgaagaccagcaggcgggtgcgttcgatgtgcttcaggaacttgtgacccatgccgaagttcgcgtgggcgccctcgatcagaccgggaagatcggcaactgtgatggagcgcaggtccctgtactcgatggttccaatctggggtcggatggtggtaactgaggtaggagttgttagttaatgattaaataccaacttgatctagcaataactcacagggataagctgcaatttttggtttggcattggacacggccttaagaagggtgcttttgccagcgttggggaatcccacgagacccacatctgctattagctttaggtccagatttacagtgcgattctccccgggacgtcccagaaaatttgtggccgtgcatccgccagtacctccgcccgccacaatgcatgtcgcctcgtgctcgtcgaggtcggcgatgagtttttgttggtcgtcatatacctggacgcccacaggcacctcgatcctctggtcagctccacggcgtccaaagatgctggctttgctactgtcctcgccactggatgctgccactcgcttatccttcaatccctggacgaccttgcgaagggtgagtccttcctttgccaccaagtagacgcaaccgccttggccaccaactcctccgtatttgggcagtccatttccaccatgtcctccacgaaccgctaggcgcagtgtgtccagaaaagtgggccggaagtgggcacgaccggtctgggcattaaaaccttttgatattacttttgatttaggtataatagtaatgttctcacagatttgctggattttaacaggaatttaaagatttgcaccatcgcgcaggcggcattatacaatagcgatgagcagacctgcaaaaagtgactgattcactgtgaccacggagggaaataaatcggtgtcatctaatttagctcgggcaaaaacttctaaattaccaatttaagggtggaggagacctcatcattgccacgtaagtcgtggattaattttagtatttattagttaataaccagtgaaatccattcaattcacagttatgctgaacgcgaccaatatcttttcttctatcgataaatcatcacaagcagctgattgacaaaaacaaggtagaagaagacgcataccaacacgtgcgattgtttattgtgaaatggattccggtatttgctacatcaaaccagagtaagtaagcttaatggcgaatatttggttaattcaattcactctttataccttttagatacctggtaactgaagccgatggcggcagtgctgcagctaacaccgaaaacagcgacacaaacaaaagaaaacgcgaggacggtggagaagtggaagccggtgaaaaaaagaaatgggataaaaaggaacgcaaacgcggacagaacaaggttcgtcaataatatataatatagatactatacaaaatatcgtatttttagaaccgcccagttttcaaggacgagcggtactcgcatctgtgccactcgctgatcgatggaaccggtggagaaccttgttccctggccaactgtcgctatgtccacgacctggacgcctacttggccgccaagggagaagatttgggccctgaatgttatgtgtacaccaccaagggctactgtgcccgcggtgtgagttgtcgctttgcaaaggcccacactgatgaacagggcaggaacctcaaaagggaggactacgatgaaaatgctcctccaaccacatgcaatggcgtcagttcaggtgggcaattcttctgcacctatcagctaactgatactaaagtaccttgataaactcattaattgaacc

SEQ ID NO: 42725 - DNA, 1179 bp, DROSOPHILA
atgcaaatctgtgagaacattactattatacctaaatcaaaagtaatatcaaaaggttttaatgcccagaccggtcgtgcccacttccggcccacttttctggacacactgcgcctagcggttcgtggaggacatggtggaaatggactgcccaaatacggaggagttggtggccaaggcggttgcgtctacttggtggcaaaggaaggactcacccttcgcaaggtcgtccagggattgaaggataagcgagtggcagcatccagtggcgaggacagtagcaaagccagcatctttggacgccgtggagctgaccagaggatcgaggtgcctgtgggcgtccaggtatatgacgaccaacaaaaactcatcgccgacctcgacgagcacgaggcgacatgcattgtggcgggcggaggtactggcggatgcacggccacaaattttctgggacgtcccggggagaatcgcactgtaaatctggacctaaagctaatagcagatgtgggtctcgtgggattccccaacgctggcaaaagcacccttcttaaggccgtgtccaatgccaaaccaaaaattgcagcttatccctttaccaccatccgaccccagattggaaccatcgagtacagggacctgcgctccatcacagttgccgatcttcccggtctgatcgagggcgcccacgcgaacttcggcatgggtcacaagttcctgaagcacatcgaacgcacccgcctgctggtcttcatggtggatatattcggcttccagctgagtcccaaacatccgcatcgcgactgcttggccaatgtgtatgcgctcaacaaagagttggagctctacgatccatcgctgctggagaagcccagtgtcctgctgctgaacaaaatggacaaggagggtgcccacgagatctttaccaaagttaagccgctcgtcagcgatttggccagcggacttgaacagtgccccgaggaactgcgtccgaaacaggtgctcaatttcgacagcattgtccccatatcggccatgaactcgtcgaagatcacgcaagtgaaatcccagctaaggaggaccctggtgcggctggctgagaagcagttcctggcggacgaggatcaggtcaaggagaagctaagacagcgcgttggggtggtgggtccaaaaattacctag

SEQ ID NO: 42726 - protein, 392 aa, DROSOPHILA
MQICENITIIPKSKVISKGFNAQTGRAHFRPTFLDTLRLAVRGGHGGNGLPKYGGVGGQGGCVYLVAKEGLTLRKVVQGLKDKRVAASSGEDSSKASIFGRRGADQRIEVPVGVQVYDDQQKLIADLDEHEATCIVAGGGTGGCTATNFLGRPGENRTVNLDLKLIADVGLVGFPNAGKSTLLKAVSNAKPKIAAYPFTTIRPQIGTIEYRDLRSITVADLPGLIEGAHANFGMGHKFLKHIERTRLLVFMVDIFGFQLSPKHPHRDCLANVYALNKELELYDPSLLEKPSVLLLNKMDKEGAHEIFTKVKPLVSDLASGLEQCPEELRPKQVLNFDSIVPISAMNSSKITQVKSQLRRTLVRLAEKQFLADEDQVKEKLRQRVGVVGPKIT

SEQ ID NO: 42727 - DNA, 9795 bp, DROSOPHILA
atccagatgcgccattgtcactgtcatcggctgtggcttcctttcggctagaactctgctctgcggatgataaatgacgtcgattcaacaaattggcccacacatacatggcccaaaacccgaacccagcctcccagccaaaccattttggccaattgagatggaaatcaactcgttttgtgccccacatacacgtactgcatagttaactccccgatttcgatgggggattggggctacctactccgctcgatccgcccctgaatttacatttggctgtgtctcaggaattaattcggaactgttttaataattctttgcatgcggaagatacttcgagccagatggattcaactgaagttaaattttatgcaaattaactaccactgtctgatttacaagttcgcatgccgaagggaattcaacattgattacgagcctttcgtttaccttttcgtacttggtttaaaaacatttatcataatatttggcacaccaaagcaaactcattggtttaaattatattactcatttcgaaaaagtgttttttaactcacctacggctacggcttgaaaatgttttagaagaaataaaaaagtatttcgcgggcataaattgtcccaatttctttttttaacttttttatttttatcatttttattttatcatatatatttatatgaatcacttcatatatggtgagattaaatgagatttgcatgctgaacggtatcgaaagtaattgttatttacctaaatcaagtaaaagtgtttaatcaatagtttttattatgtaatttgaagtgcgaaaagtatatatttgtttccttgctttaatgtattgtttttaaaattattaaaactcgaaaaatcattccatgttatgagttacacgccaaccagccttctgtcagctagcgaaatcagcgagcttttttccgcgaagcatgagggctgcaacattcgcagtgtgcacagtgccctggtcaaatgtttttgtttgttgtgtttattttttacttatttcgcgtttaaaagtgttttaaagtgagatttaaagtgcaatggagctaccgaaggagttatccgttgcggagatccgtaattacatgttggcaaacgagtgcaaggtgacaaatcacgccttggtgaagcacttcaagaaattcctaactcacccgcagtcgcaaagtgagtcatttgtgtttgtctttcgaatttgggatttgggacctgttgaatggccaagaaaacccatattgacttggttttcacatggatgttcccaatgattaattgcagatgaggctcgcaagcgattcaagacctatgtcacactgctgtccaccatcaagaacgagaacaatcagaagtttttgatattgcgcaagaaatacgtaaacgaatgccccacggatgaggttgtggagcgcgcggtggccgccgcatctggtattccggagccctcaagtcccggcggcgcatctcttaactttgactcgcccatgaggcagccaccgccatataaaccgccgcccatggtcacctctccgccagccgtttccattgccaaggagcaccaggagaattaccaggagtgcgtggacgaattcacggctgccataaagcgcattgagccagcacgcttggagaggcgaacgtcggtcaagtccgaggatctggatcagcaggagaagccggagaaaacgtctcgatcgaattccatcgatgtgatcgacaacaaggagaacataccacgtttctccttctcctcggaggcctcctcggcgtccagcacttccattgaaaagccggagatggctgatcccacagctcccgccgccgtaggcgatgtggccgagaatcccatcagcgtgaaggaggccacgcgcaaatttaatcggatggcgtctgaagaagaggctaaaatcatatcgccgccagctaagaagaagccagagaaggtgagtgccacagaaccggttaagccagggcattagccatcatgcgggctcggctcgggtgcgggtgtctttcgggcccttccctcccagctttgttccaatgcgttccatttcctgtgcgtcagtgggaagattcgctacaagacaattcaaatatgcgacgttttttgcacggcttagttgtgattaattatcacagagctatgaaggtttttatatgagctgtccactgtggcaaaaatatctgaagacgttgttccacttaaccagctgcttttttcaatccatcatagactacacactgtaatcaactttgttgaatcatatttgttaatgttctataatctcactcacgcctttgtttaaactaaagaggaacgatttctattatttacatcgaattcttcgtttagtgataaggatgaccttcataatttcatatatatctggcaacttaaagtagttcttagcgtatatacactgtataatgggattaaaaaaaaaatatttgctttcccatcactgtatatgacaaagaaacaggctgatattccgctacaaatcagggtcagattagatctgctggccctggaaaccccgagcaattattgtcaatgcatcagtggctgtcccaggctttgggccacctcaagtggaactgctggcggaatgctagatggccagaatgtcagagtggcagagtggctggctcaaactaagccggtcggttggtcggtcacccaactgtctgtcagttcccagagccatgtcacgaattgccaccagcacaggccgaattgaataaatccattaattttattagtggacaatataaatgtaagtctcataaaactacatacatgcgcctgcatcgttccgttcgccttcctgtccactttttctgtcccggctttgtcgccgccgcgcattcaagagctggtgagctggagaactggcgaactggtgagctggtgagctggagaactggcgagctgatgcccgacatgtgtacgtacatgtgcggacacatgtactccgattccgaattcgattcccgcccgagtgcgatgtgtttagtaactttgttccatcaactggccatgacgacactttgcaagctgttcagcaaacccacccccctcccttcacacccctcgcattttcatttctttattttcttgatgccccaaaagcctattatgtgtacaagcacatcgtaggacatgccaagtatgagttacgtgagaaattttgcggccagcaaatggtatgcaaacactcagaaaaatctggaatcagatgaaatttttgatagtacatctaagtagttaaattgaaattgaaacttgaaaactgaggaatttagctgtttctcataaaaaccgaaccatttccacatcctatgactataattgatgtaaattggaaatggaaacctttagcacttcaacaaaatcaactcgaaatacacatacatacatataatttgtagcgtgtccatttcgagattctaatttagaaaaaatatcaatctcggggtgagcatgtggcagtggaatttgtcaagcgttacggaaaaatcgttccttagttaatgttacaagctatagtagtgcaattgggccgagttgtcaaacaactgtcatccacttaggcccgtcaatcacgcaatttagagttgaaaacgaatatccccagtgcataaatcatcggagtctgtctgcgagacggatggtcccatccgcatccgtatcccattccattccaatctattgtatcatgtttagagcaagatgctccgcagcagtggatgtacatcaaagtgggattgtcaacggcacgtcagatgctataaaatcccactaaaacatcgggaagcgaacttaagtgcctatttgtacagacactcggacatggtagaatcaaactagtccttatatcggaaatctgtttcaaagcatcactgccgcaactttgaatttctcacgtatttcatgtttccggatttacgcagacaaattaaaaatatcaatataaagtcgaaattaaatggaggctatggggaaattctcgctaacaaggcttaaacattaaaataaccagcgttgtctaaatttcgttgaatgaatttactattacttatcatcgaaattatattcattcatttgaatgaatgaattcacttgaatttcgctcatcttttcgccagtcattactaatttgtctgcaacatgagtagagtttaaaacgaagggctatcattcactatcatatcgtacagatcgggttgatagctcccatttgatgcactgagaataaagaaagtatctgtggcgttataagcgcttacatcttgttaacaaattgattcgctaacaagacacaccgtcatttttgatggcgccaaccgtcttcacgcaattattaaaattcagttgtaaacaatattgagataggttttgatggatgccccttttttttcctgttattcatcagagaaaataactaatcatcgctagacgaaaagaaagtggctcatcatcttcacaaggagtttcgaaggcggcattctagttcatgggattcatgggatcgaaaaaaaaactggggagcaagtgaagtggattcatcatggtgtaccgtgaaatttttggcgttgcaaccgtaactatggaatctgtatccatccccagctagctgatcaattaaattcgtttcgatcgtttttaattagcccgatgattttgcattttgtacgctcactcagcaccgttgtgagttgattaatttacgccccaaaataacaagctgatttaaaatgggatttttttttcgttaaataactaatattgatagaagtatcatagcttgggatttttttttttctttttgattgatgaaattttcgaaggttaacgggaaactacataaatttttcggttcaagagcaaagttatcatgaattccagctaaaccttcatatctaaaagtaaaagttaacaacacgatgttaactgaagtagcgatgttggaaattcaaagaattgccaaaatatatttttaacttaagattgcctcggtttgtctggcaagagttgaaaaaagcgaatattacaatttttaacaaatcaaacaatcacctaagggaaagtatctttcataaaatagtaattaagatgctaaagctttcaactatcaaacaaaaactaatgaaaactcagtccgttgttttgtgaatctaatttaaaacccctggcagcgcaaatatggccccaaagcaaagttcctgcccaaaagtccgcatgcagcatcaaacagaccgcatatatattcttattaaaaataggaggccaccttcgtagtcccacagtgcatataaaactgtcaggcgacccacatcgaaatggggggcgtggctgggtcggtggcgaaacgaacccttttgcataaaacaagttggtgaaacatgttaacatagccaataagcagcaatagaaattagttaggcaaagctattctcatcacggtcatgccagccacaaaggacccaattaaaaatgtaaggaaacaaaccaaaagttgttattgctgttaaacaacaacggactgtgtcccgaagcggttaaatttacaacagcaacaatatccacccgttcaccgccgaagttccagccactcccactagtcctactcgtactggacaaaaaagcgaacggagttgaatccccgtggcctgtagcctgtatcctggaaatggaaacacgaccattttgtggcatcggtcgaaaggtaagactcgccgggccaacgtaaacactgaagggacatggcccagaccacgagttccatatcgtatccactctctcttttcctctgcatcccagtgtgcagttgtcggtagtcctgggcgcagggccatggccacatcctggcaaaaggacaacggccagctgtgtgatataatatcgggcataaagggacacggcacacaagaaaactggccaacaaacaagcgattggggagcagaatgagtgggtggccagccagtgcgatagacaagggcaaaaccggtgctcaatccctcccggagtccccaagttccgcattcaaagttggagttcgagtcagagttccagtccgagttgctccgggttttgcctttttctatactcctctttttttgttgtgttgtcttctccccctcccaaagccataaaaaagcaacataccattaaaatggggaatccttcggggtggctgcttgcagtcggaaaaatgtacatcattagttagttagttttaaagggtttacttttggtttattataaaaaagataaatgaaatatgtaggaactctgcaaaattaatggcatttctgctaatcactattactattagatactatatacttacataaactgaattctctgttcttcatatcatttaaatacctctttaatatctttctatgataatagagttcgcaatgaaatcgttgaattaaaaacaccctaccaatagtaatgttatttaacttcttttacaatagcattacgttgataacgtaactaactactctaattggctatcatattgtttttcccgagtgtggtgggcgtttcagttcggttgggtctggctttccattgaatggagttctgttccggggtccgagctcttttgtttagcattgacatggccacttggccagagggcctgcgtctcaatgtttgtactgttttatgatgttcggctgctgtttctgttcctgttcctgttacgcctgtcgcctcgctcgctcgctcgctcaaatgcccgaatccgtatctgaatccatatctggatgcgagttccatccagaatgccctttgcaaatggcgactgcccttcgcttacctgtgcaaccggacggagtaaaacacccgtccgtaattggaaaaacgtgagctctccaggagtcaagtggcgtgtaaatagaatggaggggatggaatggaatgaaattgaacgaaggtcctggcacgcgttctgcgcatcctgcggccaaaatgcggcattcaaatgtcgtcgtatttattagctatgttacgatgggcccgggataataaaaggccccgtagagtgggtgatgttgttgttcaggtgaaagttgggaatgggtttacccgggtattccgggtattccggggattgcacagcttgttaggcccgcgaacataacgcgaatggataattagttgccgaaaatgtgttgtgcgctcgtaaatatgaggcacacatgtcgggggcttctccattcttattgtcgctggcacatgtgtgtttgtttgggaagtagtcaacacactcatcttctcctgcatccgaggaaaccccagccccagctccaaccctcacccgcggaaatcattagagggctcattatcagcagcagccgacttttgcgggtgtgtgtgtgtgtgtgtaagtgtgtaaaaaactgtgtaaatcaccgaaccaaaaaacatctactactttcttttcgaaagggagctgctgtttgagaagaacgcagcgcactttctgccttaagcacgcgtctaataaataaaaattattaccttcataattagtggaggaacatggcgatggcgccgtcgaatgcgtgagcataattaccatccagcttttacgcccgtgtctgcacccttggaacaacacatatcccaatcccaatcccatccacatccccatcccccaaactcgtgggcatcccatcttgacactcggaaaaatgggctgagatgtagatgtggaaatcctgtgtggaatgttgtgacttcaattctaagttgtagtttcaaatcagggattctgatgtttgattaaactactagagattggaatccttcgcaatctttaaacatatacattagtgattatcgacattttatatcgatttgctggttattcattaataaactatagtaagttctatcattagaatggatatagcattattcttgttaaatttcaaacgaccaacagcgttttccttctggtttcaatttgtgcgcgcattcgtgctcgatctaattaggaaaaactagatatttttgaaagtgcacctcctgctcgaaaagcacccgttccatatcccatatcccatgtggatgccacacacacacacactgggattgtggggcaatgttggccgtgtgtgcgagtgggtaaattagaatcggtatattccgggaggcgacgactgtgttggcgttaatgctctcaatgggctttctatgttttattcccgcttcgtgccgatgtttttcgttttggtttttttcgattttttgttttattttgttagcagtggtacaacgcctccgccaacgccccccccccccccatccccgcccctcacccccttcaagtcgtagacaaagtggcagaaacatgcataattaatttatgcccctctgggcgcacctcccgctcctcttctccattccttttgcagcaattaatcgaggagaaggattcaccggaggttacgctggcgcatcccaaggcaaaggagtggatagtctcgatggcgaaggctaattaccaggagctggccaagatggccagtgagtatccggaactggttaagctgcaggtaagtctcacagattccgcatttcttagccacttttgagccatcttttagtcacattttgagcaaccttttagccagtttaaagcctccttttagccacttttaagacaccttatagccacttttaagccaccttttagccactttttccacccacgatgctctaacaaatgcgacaagtacaaactattcataagcattaattacgacaaattaagcagcaacgcgctgtttttgccatgtcgaacaacacttaaaaatgcgaggaaaaatataataacgacaactgagggaccggccagccagagggggcgtggcagccgtggggggaggggggatttggcgtttgtcgcatagcaagctgaaaaaaaaaataaattaaataagcaacaacaacaacaacgccagtcgaggcgacaattaattgtgaaatatgttttcagcatttttagcacttgtaacgcatgttaagaagtgggcgtgagcgcgactccgaacaacgtaggccttacggatcggccatagatatagacatagatatagacatatacatatagacgtagatatatggtctggcattgggcaaccactgacgagtgatcttctcgcacagattgcggatgagaagcgggctagaaggtttccaagcgacagacacaatcgcatttcttcgcactcctgttttcccacaaaagatttgcaatgactaattgtcagcaaagggataattgcatataactacctacaaggacatataacttaaatcttacagcatttgttgcaaggatctatattcaacgttaaaaggcaaagaaaggatttaaaaatttatcttatcgtattttcaattatcatattatttattcaaactgcgaataactaagtaataaatgattaaatgcatcatattttacctttcatgtttatatgtagcttctacaatttcataactcaaaacatagtaacatagttctacatttctacgatagcttttgatttattcgtatttatttggttttctcctaaagaggaatttataaattattacctgtgcttcttttagaaattgttaattgttggtaatcaaaaatgttttgacaccatgtctgaatgcgtttttccctaacttattgccctggagaaactttgttttaaagtaacataaataataaaaaacaagggctacatt

SEQ ID NO: 42728 - DNA, 1184 bp, DROSOPHILA
tttgttgtgtttattttttacttatttcgcgtttaaaagtgttttaaagtgagatttaaagtgcaatggagctaccgaaggagttatccgttgcggagatccgtaattacatgttggcaaacgagtgcaaggtgacaaatcacgccttggtgaagcacttcaagaaattcctaactcacccgcagtcgcaaaatgaggctcgcaagcgattcaagacctatgtcacactgctgtccaccatcaagaacgagaacaatcagaagtttttgatattgcgcaagaaatacgtaaacgaatgccccacggatgaggttgtggagcgcgcggtggccgccgcatctggtattccggagccctcaagtcccggcggcgcatctcttaactttgactcgcccatgaggcagccaccgccatataaaccgccgcccatggtcacctctccgccagccgtttccattgccaaggagcaccaggagaattaccaggagtgcgtggacgaattcacggctgccataaagcgcattgagccagcacgcttggagaggcgaacgtcggtcaagtccgaggatctggatcagcaggagaagccggagaaaacgtctcgatcgaattccatcgatgtgatcgacaacaaggagaacataccacgtttctccttctcctcggaggcctcctcggcgtccagcacttccattgaaaagccggagatggctgatcccacagctcccgccgccgtaggcgatgtggccgagaatcccatcagcgtgaaggaggccacgcgcaaatttaatcggatggcgtctgaagaagaggctaaaatcatatcgccgccagctaagaagaagccagagaagcaattaatcgaggagaaggattcaccggaggttacgctggcgcatcccaaggcaaaggagtggatagtctcgatggcgaaggctaattaccaggagctggccaagatggccagtgagtatccggaactggttaagctgcaggtaagtctcacagattccgcatttcttagccacttttgagccatcttttagtcacattttgagcaaccttttagccagtttaaagcctccttttagccacttttaagacaccttatagccacttttaagccaccttttagccactttttccacccacgatgctctaacaaatgcgacaagtacaaacta

SEQ ID NO: 42729 - protein, 322 aa, DROSOPHILA
MELPKELSVAEIRNYMLANECKVTNHALVKHFKKFLTHPQSQNEARKRFKTYVTLLSTIKNENNQKFLILRKKYVNECPTDEVVERAVAAASGIPEPSSPGGASLNFDSPMRQPPPYKPPPMVTSPPAVSIAKEHQENYQECVDEFTAAIKRIEPARLERRTSVKSEDLDQQEKPEKTSRSNSIDVIDNKENIPRFSFSSEASSASSTSIEKPEMADPTAPAAVGDVAENPISVKEATRKFNRMASEEEAKIISPPAKKKPEKQLIEEKDSPEVTLAHPKAKEWIVSMAKANYQELAKMASEYPELVKLQVSLTDSAFLSHF

SEQ ID NO: 42730 - DNA, 15648 bp, DROSOPHILA
cttgtacagctttgggttcaaagtaaaactggaataaggcaaagctcgtgctaaccagacttggcttcatctgggtatttactaaccactggattagagtattctcatagctcagaaaacggaagaaccggaactgactattctcctggtgcacacaagtgggtatacaacaggtcggtgttgtattgagttgttgagagagttccaaatgttaccttcttgttttgttttcgctttgaggatgcttaatataattgcgataagattaaaagcagctggctgcccggccagatcagatcctgtttatttgatcgttttccgattggtttcttttatcgatgacatgcccgccaatttcgaataggcactctttgatacacttaacttgtagagtgcattcgttgaagagtattttacaagtaaaattcatcgttttcgaccctataagatattcttaatcaggatcgttaacaaacaatagaaagttcagaataagcattcctattccagtgagtcggatgtagtgctagatagtgcttaggtttatataggaaagacgacctccgtttggatctcccagaagaagtaagctagtttcagtttcattatgatgtatatttagaaaacctccaactaatattgggccatctacaagtctacatacacatatacgctcaaggatattacaggatattatagatatattatctatagttcatatatgacagtattacggaaactaaaacacatttatctcacagttaaagtacgtatgtataataagtaaaaacaaaaacttaaggaacattttgtgtttgtttctttgtatggcatatcttttcttcacaagccacttatgaattaataacgcattaaaatcaccggtagagactacgtggtaaaactagaagacgtgatgtggcattgtacaatggttgtacaaaaaggtctataaaatggtacagctaaaactagactaaaatgatttcatgtaggtagactaaaccagcagcatgtcgtcgttgtccagcggctcgtccttgatccgattgccggtcggactagtggcgaagtcgctgaggaatatattcgtgtcgtcgtggttcagctgcagtgtgggtattgcacctggacgcagttcacccggctggaggaagcaatgcgactcaaagtgacgacagcagatgtgcttggagtggtcccacttgggtatggcctcgatcttgagattgtagcaccacttggctcgctgattgcgctgctctggaaagtccagcatcggcaactgggcgttttccactccgcagatgacgcagctgaccgtcctgtcggtgggcaagtggaccgagcagatatgtttgccccggtacctctgggtatccgtgagcctgagtgcctggcaccactgcctaagtagcgctgggtctttaataaaagaaataataaaagttacatgggtcttatattgggtttctttacttaccactaggaaacttgtgcagcttaacatttccattatgatgacagtcagccatgcaacaggttgcgattgggagtggaggatccggctttctcttcacttcatcggatggtgcctggggacttaagtgcctcgtgggaatggcgtttcgcatgagacgtcttacgccaatcaactcgggttcaaagtgtcggctgcaaatcaggcgagtgtttcgttgcgactccttgaacaccatgcccgtcgccagctcccagttgcgtatggaggttcggttgttgggcagccgaaacagtttgatgccatcgccacggaaggctcggcagtaaggaagacaacactgcttaactttccacggcggaacctgcccgggtggccaaggatccagcttggaacgccgctcccgcttgatgcgcacctccgggccgatttcctcttcgtagtcatcctcctcctcctcgtcctcctgcagcccgtcctcctcatcggcatcgctctccgcctcgctgcgatcggtggagagttcatggcactgttcgttcgtaaagatcttctccggcacattatcgcctagctccagggtgggaactgcccaggcgcgcagcttccgcaggctgatgcagtgaggctcgaaatgcacgctgcagatcataaacttccatggccttcgctcatcgtagcggatgcggaggttgtgcatccaacgctcctgttggagcttcgacttgggaaacttgtagatgtggacgccatgcttagatctctgccgctggcaatgacttaaggagcacttatcgtatcctgacttcacctggttgtaggtcaccttttcctgcttcacaagcaaacgcagttggcccttccaatttgtctggtttaagggtatttgcatagcttctgagtcctccacctcttggtcttcgtgaagctgcggttctggttccagggacggcattgaatcttcatcctcctcctttatctgcacggtactgtggtcagtccccaacttcttgtccagcctgaggttaatggcttcgaagtcgttgtcgaacagttcggtgggagacttgctacctagttttaatgtgggcacactgccatggactagtctcatgttaagcaagcacaccggatgaaaatggacactacatatccggtatcgccaccggtggaaaggatcgaaaggcacctgcgtgttgtgctgccacttgaggcacatgtcctccgaatggggaaatttgtgcaacgttatgttttcagtggtcaggtgattcatacatccctcgatctgacaaaacttactggactttcgtggcggagccggagttggcagacacagttttattacctcccttttcggcttttttgtatcctcaaactcaaggtcttcaggcaaaatgagctcctcagtctcctgcaatgcgaattcattgtcgtacaccttatccggtctcttaggtcccaggagaagagtgggcatcgctcccttctttatcctggcgctctgaaagcactcctgctcgaaatggtaactgcaaattctataccgccaccagaacttctcatccatatcgacttgggtgttgtgcatccacttcctagcggcctccgaagatgcggggaacttgtgcagcttgatggtcccgcccacgtcctcaacggtcacttcgcatccttcaacggcgcagtggttggcattgtactggtttcgaacgccattagattggtagacggcttgttcggtatatgactcgtccactctttcgtagctgtccatccgctcaacgtgaccaacctccagaaggacctccagagcctgcatctcagagtcttcttcatcggactcgatgtgttccattcttacaataggctctagaagagaacagtcacccgcttcctcctcgagcggctcttgctcctccagttcctcctctctctccaatttaattgtatcggcttcctgggtcaattttatcgtcatttcctgccactcctccttagtgggaatttgatgcaccggatttccaggtaagttcagagttggaacgctccacggatgcagccgcctgtcgtcaaacgaacatcgggactcaaagtgattgcggcataccctaagcatatattgctgctgcggctccgtaatctccagttggccattctcaacccacattctcagtatgtccttcctttgcggcaacccgtgcaggagcaccttatcccgcggcctgatcatttcacaacctttaaccgcgcaactaacgattttgacgcgcctgttgtttcgagcagaatagtagttttcttcaagaaatcggtttgaaacgtgctccggaaaacttttgatacttagctcgtaaagaataacgtagtgtagtgggcatagctgaccgacaccactcgacggctctttgatcttcaaatgacggagccacgctgtccgtaggtcttcttcttggggcagattgaatgacacggttttgcacagttccttgcactcaggataaatgcaatcaagatccgatactatggctctcctttcaaactttaaacttttacccatgttttggatgtccgactgaaatatatcctgagaggaatggcccagctccagtgtgggtatggaacccgatattaagccacttttattgaaaagagaggcttcgaaatgcacactgcagactttcagactacccagttggtcattttctacgctcagttgaagattatgaatccatttcttagccaacgccaatgtttttggaaatccactaaacttagggtctccaggctgccatattcgaccacatgcagtggcacagcaaacctcggcttttttctgccagagaatttctgggttcggtaacatctccacctcttcgtcgtggcctagcatgagagtcggcagtgcgccagggcgtaatcctttgtgggcaccgaagcaaaagggctcaaagtgacgctcacagatgagctgctcccccaatccgaggtcctggcaactgatcttcaggttgttgctccaagcattcagttgagcagtggtttttggcaccttgtaatagcgcagacgtccttcagatgcatccttttcacatccagacactaggcagtgtctttcgatgtcgcctctacttaactccagagtgggaacggatccctcaatcaaatttaatgtgtccggctcgaagcattccggtgcgaagtgagactggcataccttgaatccatggctgctggcctgcatggagcgatgtctacacgcggctgcccactttcgtatagttggcatatccttgggatactcataaagtcttacaccgctagcttcagcctggaaacaagtcagtacggagcaatagcgctcccggataagcctcatcgcctcctcagtatcctggcccccagcaatgtttccattgtgcttggcattggggataacaaacccgtcgtggcccaggtttaaggtgggttctgcccagcaacgaagttgttttttgcaaatggcgtctggttcaaagtgagattggcacacatatagctctgcagggtccacaatgcgaggttgctgctgcgtgttcaccagccaccggagtagggcctgctcttcggtgggaaagcggtagagtcgaacttgactacttccaatctgtccacatgtggaaatacaacatattctgatcctgcctcgaggactaggacttgcactcgagcatggacttcccaaggaggtcagatctgttttaattctcaatggagttagtctagagttgctgtttggtgtaccactgcgagattcaggcctgagattcaaatgaagctcgtcatcgtggtttaaatgcaaggtgggtatagcccaagctttcggaaaattcgcctctaggcaagtcggctcgaaatgaagaacacatatgcgatagcttttgtgctttaaatgatcgtaagatatctttgtgttttgcagccacttcaaaagggtagcatcctttttcggaaaagggataagctgaagatccccatcagatttggatgaacaactgggaacagcgcatctaagttcgtcaacaatccactgcaagtcttccaaatcttgtgcggccaataccttggggtactccacctgttcaaagagttgcataaagtgctcactacaaagaagaccctcactgctgggtggcaaattgaggtgactcatccaggcatctcttatgaccgcatttccaggtaaatcaacaaagcttaactggtccgatgaagaattactgcactctggaaacaggcaattcccgctgtttctgtagatgttccaactgttttgatctagctgtaaggtgggtacagcctgctccaagggctttccgttttgcaccacttgctcctcaaagtgctttagacacacttggatttccttgaagtccgtgtccacggataactttaggttatgctgccactttcttaagagattttgatcctcaggcagctgaagtagttggttaacgtcgtcattcgcacaggagttgatgcaacatatttccaacttaatctttccgagactcgtcgttggagtcttttccttggacttcatttccctctccgtctgcacctccagcttgatctccctccctatcttcatcttcatttccatcctcaatctctgcatcttccgcacttccgcactccacttgttttggcggatgtccggcggctccgtcagtttccttttgcggcagtgttttaggctccaaagccgaaaaaccgagtgctgtggctgcaattgctcctggtcaagatccattccattacaagagtatctaagtggctcatcgtggcccacattgagagtgggtaccgcattttgcttcagctttcgggttcccaatacctccggctgaaagtgctctatgcaaacgcggccgatgcagtcatccggattcaggtgtagattggcgcaccacttgagcagcagttggcgatccttgggaaagccaaaggtgctaagtagatgaaaagcagtacgttcctttctgcagtgccttagacagcaaatgggcgtcacattattcgcgggcttttcgcgacgcagagggatggttgggggagtgggtgggttgtccggatgaaagtgctccgcctcgtccaagtcctcatcttcgtcgcgctcatcctcctcatctccacgatactcggcttcatcgtcacttggatgttcggcaaaggtctcgaccagttcgagaggatcgaaatagtggccgtccttctcgtcttcatcgtacatatcgtgctcatggggctcctcctcagcctctagttcttcttcctcttcatcaatcagctctcttttgggtttcagtcgtgtcatctccgagctgccttcctcttcttcggtcatgcccacctttatagcctcattgtcgtatattaagccctcatcatggcccagatttagagtaggcaccgctcccgttttcagcttcaactttccacgcacctgtgactcaaaatggtcagcacatatcctgccgcgacactgatccggcgccagacgcagattcgcccgccatttctccagaagatcctcactcctcggatatcgataggtgcggagatcgttgtcaatgctcctacgcttgcggcaatgactcagagcacaggtgggcgtaaagaatcctggtatgtttttcggattctcgtagatcggctgctcctggtggcccagttgttgcgtgggcattgcccagcttctcagctgcttgccatcaatgcagcgccgattgaagtgcgcactgcaaatccgtgtcgatcggtccacctcgtcgggttccaggcgcaggttatggcgccacttcaggtgctgctgcttgccggtgggaaatggaaagaggcgcgctccgtgctccagtcgactgcgcccacaactgcgcacacaacacttcagatcggacatagtctttctgagcttaaccttaaagaaaatacgaattaaactggctaattattgctcctctaagaatagaaaacttacctgtctcgtattgaaatctttggcatcagacacgtccgttttgacgtcctccgactcggaaaactcctgcttgatgattataccgcccgactcgtcgtgtactcgccgctgtcgtccgaaaaggttgctctgcagctccgccggatttacctggaacagatcgtctgtctcgtcgtgacccaattctagagtcggaatcgaacctatgttaagccgcgtcttcccaatacatatatcctcaaagtgagagttgcatatcttgtaccgatcgcgttcgtggaagctgaggtgttccaaccgcaagttgtgtttccatcgctcgaagagattcgcgtccttgggaaaactgttcatctggacttcgtcgaagcgacgcgtctttccgcaggtcggtacgatgcacttgaacacaggatccacatacctgtcctccggcttgggatttagcactagctcgatgtcggcgtcgtcgtgacccagttcctcggtgggaatagcccacttgtataagtgcttgggcccgatgcaatctgcctcgaagtgtttattgcatatgcgtacgccggtgcaatccaccgggttcattttgagattgttgcaccacttccatagcatatcgtcatcctctgtgggaaagcggaagagtcgcacgtcaggctgttccttggatgcctcgcagccctccaccacgcagtgctcgtccgcaaaggcctgcgcttcgttgggatagatgtcctcgtcgtcatgacccagttccagggtgggaatggcgccagcgctcagtctccggccattgaaagagtgtgtctcaaagtggcgggaacacacacggtattgggccctcatcgccgctctgggacgcgttttgatgttgtgcatccacttgcgcagctgcgttggactatgtggcagtcggaagagctggacgccctgcgcccgcgtcttgcgacaactctcgacaatgcacacgcgctgcagacacagcttgctagccttgagcttggctggattctggtaaatcttcaagccgggcggcgcattcaagtccaatgtgggcaccgccagcggcaccgggcacttcttgctcagcacgtgcggctcgaaatgagccgagcatagacggcgctgggcactgccaaccataggaacctgcagattgtgcgcccacttagccagagtggagcgattgagcttggggaagcgataaagctgaacgttgtggagagcccgaactttgcggcaatgcggaagacagcacctgggcacccaagtgggcttcacggaagccgattgcttggctttcatgtgagtccgccgcttgtacagcatcgaatgctccggattctcgtagagattctctattgtgcctgccagattcagtgttggaatagcccaaggtctcatccgcttgccgatgcagtgtgcctcaaagtgaagattacagatcctcatgcttgtcagttgactgctctccgtctgcaggttgtgcgcccatttggccaacacggaagcttcctccggcggccgataaagcttgatgtcgtccacacttggatttctcttgcacgtctccacacagcactctccctgttcctcgccattattgggcgcagtgggtcgagagtaaaactccgtaacctgttccggcgttggcagcgggtatgggatgttttcgtggcctaacgatagtgtcggcactgcccacttctctagtcttttgttgcgcagacatcgttcctcaaagtgcacttcacaaatggcgtcgttgaaaagtttacttccatccggaacaggacgctgcagattgccacaccacttggtcaataaggacacattgcttgggaaacggtgcagattcgcgtggtccctgtctcgatttcgtttgcacacggcgacgcagcacgtttcccggatgtttaacttcttgatcacatccggatttctatgaatatcgtcgtcatcgtgacccaagttaagcgtaggcaccgcaaatggacgcatgcaaccgccgatgcaatagggctcgaagtgcaggctgcagatcctcatacccttgtgcatcttttcttcgggtattttcagattatggcaccacttgcgcatctgctccggtcgacgtggtatggtgtggaatgtaatgttctcattattgtgcctcttgctctcacaactgggcacacaacatacgtccatgctgtcgctggcattcattgcagaagatccactggcacctaagcccaggtaagaggcgcttagatcaggatccacgtagtgagagtttgccgaactggcggaggaggacgtggaggccgccgattgccggtggtacgatttgctatgcaattgctgctgcagtgagtgttgcgaggaatgttgttgcgtctggtgctggaggccactgctgtgactgttgggtgccgttggcggtggccacaattcgttctcgtagatgttgaaggtatcagtgtgacccagatgaagcgtcggaacggcccctacattaagaaatcatttaaatattctttacaaacgcagcaattccgttcaaacttacctggtgatagtttgcgcagacccaacgcctctttgataaagtgggcgctgcatattttgtgatttttcccacgatacactccgggatccaagcggagattgtagcaccagcgtcgcaggagaacttcatctctgggaaatcgatatagcgacatattgaagtcagaggatcggctacggcggcagaagttgaggcagcagcgtttttcttcaacgtacaaattctttgggttatcgtggatcttgccatattgggcacctaggtgtaaagtaggcaccgcccacggcttcagacggaacttgccaatacagcgctcctcgaagtggcgactgcaaaaatgacgcggctccttcgcctgaacgggaagtcgtgcattctggcaccacttgatcaagcttttgatgtccttgggaaagttgtagaacttcaagttgctctcaccccgctgacttgtacagtgaggcatgctgcagcgcgctacctcgccggtggtgaaggtgttagtgagttccctgttttggtataaattggccacgtcgtcatggcccaggttgaacgtgggaacggcccagtagcacagagagtagcggttaatgcagcgcttcggaaaatgcatgctacagatgcggaaatttgcgtagctggcggcgggtatgtgaaacatcttgaggttgtgcagccactgattgaggtacttctcgtccttggggaacgtgaaaaactgaagcgtggggctcgtgctcttgcgcacgccacacagaggaacgcagcacagggcgtcctcggagtcgtccagcgttgaggagtgcgcctggggcccggcgatcgctcctgcgtgcattgagctgtcgcttccatacgcattattgtagccactgtcctgaacgctgtaggatgactcgctggtagagttgctgtagctccgctccatcttaacattcacttcgttcttcattgcggatgctgcgaacatggcagctccgtcggcatttgcctgacgctgctgcagtagagaattcagtgcagccgtcgctggcaaagacgagccggatggagtggttttgtggtgcggggttgtgggcactaaaacacagagaaaaagcacgttagaaatggtgttttttttttttttgtttacttatgtttcctaacttactctccatggttgccatatgacagtcctgcagcttgtagttggtctggtgctgctgcgcctgcgactgggacgcagaagatgactgtccgcccgtgtagtacttgccgcagaaatatggagcagccagacgatgttcgtgaagctctagagccgtctgataccataggcggcagatgggacagtcgaagcgctgctggaacttgtgctgcggcaggtgggcgtacagttgttcccgcgtagcgaaggtgccggagcacatctgcaaatggacgatcaatgatatagtgttccaagacgccaatgatatgtgcttcttacgttgcagacaaagctatcgtattcgtgctgcatgtactcgtgcgcctcgcactcagcgatcgtgtcgaagtgcttgccgcagtatttgtggcagaaaaacctgtcggcccggtggtgaagcttgtgccgctgcagctcctcggtggtcatgaaggacatgggacatgtgctgcacttgaagtcgtactcctggatgccgcagttgctctcggccacatggcggagatagacctgcttcttaaagaagacctccttgcagcgctggcagatgggcagactttcattgccccgatccgattgttgtttgcgacgcaggaaactgctagtggtctagagaatagaaattatgactacggtgagtttcggcaaggaaccattataaactcacccttccgtaggactcatcctttacggtcagctccactttcggacttagcatgtcctcgctgaattcgctgaatttgctgaagtcagcaaatggcgtattgtcgtctatatagttggacttgtaggaatgctcgtcaatgggttccgctgttcaagaaatatttgattactattttttttacttttaaaaccaaagtaatgtacatataatacttggttcaaaggaataataaatatgtctataatctaacttattaatgctggcgattaattcaaagatttatataaccgcgaaatgctaaaactatgcgcagatgaaaattctgtatccactgtttgctgtttctatggttccgaattgtattttgtactctccattggttggtgataagaattaactgcccctacataaaattgatagataaccgagtgctctgcagacaagcagaaatttcttctatttacattatttatggtaccaactaggctgttcgcatttgaactatattaaaatcattcttgaagtaatagctattggactcattgattggtcaattaaaagtaaaaagcaccaatattcattcgtatgtccgacttagtgtttatatttattagcaactttgccttctgcatccggatacttatgttgatatccggattacgcgaacatgttggagagactgagaatcattacctatggtatcaatgttttgggcgtcgtacccaataatatttgtctttgtctctctgcattcagccccgcccacacgcccatcgaaatggcaccgggagtgcggggcgggaccaataatttgtaggttagtctacgggagcaagttacataagaagcgacttgaaagacagtggcccaccacaacccgttccaaaaaatgtgaggagggagatgatatgcacactcactggacatacgagtgcatgcatgcacatgtgtgcgtacgaatcgaactgaataggttacgccggtagtataaagcatctatccgagtacacatttgccaaatggatacatactgacaaccgtataccatctcgcacataccgagagtcgcgcaaacagaaccaaattgtacgccacggtacggaaccgaacagagcaagatacagatacagagccgtaggttgacgagcggtggaaccgaatcagaatccgaattcgaatccgaaaaccatccgaacgaaataagcgccaaacctcagcgaaactcaacaaacgttttattgattcgacgccaaaatggagctgaaactacgctacttataagaaaatggccccaagttagtttgatatataatgcgtgtattctgtatctgtttctatggcaaaggcggattttgcgtttaggtttttcggactttcttcggcgtaaagggattttagatttgaatatttttacttccccattcaaggggcttaataaatcaacatatttggtctttaatctgaatcggcagctatgcaaaatttagtgtttcagttgccataaatttacattatttcgcgcttgtgtgctttaatttgcatagtaattaaaagaattactctcatttttataatagctactttcgtctcctggttctctgggaatctctttaagtatacacaaaaacccaacccactgtaaaaccgcttcaaggaagtatacccggtagtaaactttaaatatgattactaactaatattaatcgtactagatactcattttcgggaacttacattttattaatacttctggtgccgggggcggagccatgggattcgggggctgctggtaggcctccatgggttcgcttttgatatagggatagctgccggtcatgatattgtggcccatatagggtctttgttggcttatgtgctgtggaagatgctggtgctggtgctgttgttgctgctgctgctgttgttgttgctgctgttgttgttgttgttgatactgcagcagttggttgtgggcatatgccactgtgttggccccaaggccgtagttcggcccaccaccacccaccaccgccccactgacattgaggccaccgccagcggcgccataatagccctgcgcgccaccacctcctggcccgtatcccccgccgcccatgatgttgttgttgttgttgccgctgccactgttgttggcggccttgcaagagggggcgggggcggggccgaaggccgagtgtggtgtggggtaggaagcaacatgtgagtaccaattggcgtgctgctgctgctgctgctgaggcgacagctgcgcctgctgatgctgctgctgctgctgttgctgctgcagggacatgggcgtcacggggggcgggtagtggtgggcgtagtggtgggggtgggcgtgatgggggtgttgttgtgacatcacggacgcggtgctgcctgtgtttatgctgcccactggtaagtgtcgcctgctttcggttcgccttgtggtatgttatcctgcggccaagttaggggcgcgttagctctctttttcgcaagcttttggcgtcttttatataccagtttttcatcggcccccgtctgtgtgtatgtatcgaactggcattgttgctattgtcctttagatttcgcattttccaactgccgcggcaactcacacatggcactctgcaacagctcggcaattgcacttaatattggctcgaagcgggcgaagggttttgaccattttacgctttatttcgctcccgaacgcgcgacgaacgaaacgtccagcgagacacaacaacaaactgtttgtggagcgcacttagcggtggggccacagtgaccagctatcgatagcagttctatcggtgtgggagcttttccatcgcatggaaagctttcgaaatcgaattcaattcaaaggattctacccaaggacttacactttgttctatcgaatcttactcacttactgcagtaacaaagttagaaacaatttttaatttcagttcttggtaaagttttcaaattgatttccgacaaagaattaaacacacaggatgctttataagaagtattcttcttgtcttactgcctttcgtattttgtagaaaaactaatttaagaataagaagtcagtttgcagtacatttccgctgctacaaatttaatttaatttcttaagccgctcacaaaactatttgcaataacaactaggtaatttttggacccaccaccccaacgcgctgtcttagcttctccttgacctgatcctcgtccgccaggaactgcttctcagccagccgcaccagggtcctccttagctgggatttcacttgcgtgatcttcgacgagttcatggccgatatggggacaatgctgtcgaaattgagcacctgtttcggacgcagttcctcggggcactgttcaagtccgctggccaaatcgctgacgagcggcttaactttggtaaagatctcgtgggcaccctccttgtccattttgttcagcagcaggacactgggcttctccagcagcgatggatcgtagagctccaactctttgttgagcgcatacacattggccaagcagtcgcgatgcggatgtttgggactcagctggaagccgaatatatccaccatgaagaccagcaggcgggtgcgttcgatgtgcttcaggaacttgtgacccatgccgaagttcgcgtgggcgccctcgatcagaccgggaagatcggcaactgtgatggagcgcaggtccctgtactcgatggttc

SEQ ID NO: 42731 - DNA, 11693 bp, DROSOPHILA
ttcgtcgcgcgttcgggagcgaaataaagcgtaaaatggtcaaaacccttcgcccgcttcgagccaatattaagtgcaattgccgagctgttgcagagtgccatgtgtgagttgccgcggcagttggaaaatgcgaaatctaaaggacaatagcaacaatgccagttcgatacatacacacagacgggggccgatgaaaaactggtatataaaagacgccaaaagcttgcgaaaaagagagctaacgcgcccctaacttggccgcaggataacataccacaaggcgaaccgaaagcaggcgacacttaccagtgggcagcataaacacaggcagcaccgcgtccgtgatgtcacaacaacacccccatcacgcccacccccaccactacgcccaccactacccgccccccgtgacgcccatgtccctgcagcagcaacagcagcagcagcagcatcagcaggcgcagctgtcgcctcagcagcagcagcagcagcacgccaattggtactcacatgttgcttcctaccccacaccacactcggccttcggccccgcccccgccccctcttgcaaggccgccaacaacagtggcagcggcaacaacaacaacaacatcatgggcggcgggggatacgggccaggaggtggtggcgcgcagggctattatggcgccgctggcggtggcctcaatgtcagtggggcggtggtgggtggtggtgggccgaactacggccttggggccaacacagtggcatatgcccacaaccaactgctgcagtatcaacaacaacaacaacagcagcaacaacaacagcagcagcagcaacaacagcaccagcaccagcatcttccacagcacataagccaacaaagaccctatatgggccacaatatcatgaccggcagctatccctatatcaaaagcgaacccatggaggcctaccagcagcccccgaatcccatggctccgcccccggcaccagaagtattaataaaatcggaacccattgacgagcattcctacaagtccaactatatagacgacaatacgccatttgctgacttcagcaaattcagcgaattcagcgaggacatgctaagtccgaaagtggagctgaccgtaaaggatgagtcctacggaaggaccactagcagtttcctgcgtcgcaaacaacaatcggatcggggcaatgaaagtctgcccatctgccagcgctgcaaggaggtcttctttaagaagcaggtctatctccgccatgtggccgagagcaactgcggcatccaggagtacgacttcaagtgcagcacatgtcccatgtccttcatgaccaccgaggagctgcagcggcacaagcttcaccaccgggccgacaggtttttctgccacaaatactgcggcaagcacttcgacacgatcgctgagtgcgaggcgcacgagtacatgcagcacgaatacgatagctttgtctgcaacatgtgctccggcaccttcgctacgcgggaacaactgtacgcccacctgccgcagcacaagttccagcagcgcttcgactgtcccatctgccgcctatggtatcagacggctctagagcttcacgaacatcgtctggctgctccatatttctgcggcaagtactacacgggcggacagtcatcttctgcgtcccagtcgcaggcgcagcagcaccagaccaactacaagctgcaggactgtcatatggcaaccatggagatgcccacaaccccgcaccacaaaaccactccatccggctcgtctttgccagcgacggctgcactgaattctctactgcagcagcgtcaggcaaatgccgacggagctgccatgttcgcagcatccgcaatgaagaacgaagtgaatgttaagatggagcggagctacagcaactctaccagcgagtcatcctacagcgttcaggacagtggctacaataatgcgtatggaagcgacagctcaatgcacgcaggagcgatcgccgggccccaggcgcactcctcaacgctggacgactccgaggacgccctgtgctgcgttcctctgtgtggcgtgcgcaagagcacgagccccacgcttcagtttttcacgttccccaaggacgagaagtacctcaatcagtggctgcacaacctcaagatgtttcacatacccgccgccagctacgcaaatttccgcatctgtagcatgcattttccgaagcgctgcattaaccgctactctctgtgctactgggccgttcccacgttcaacctgggccatgacgacgtggccaatttataccaaaacagggaactcactaacaccttcaccaccggcgaggtagcgcgctgcagcatgcctcactgtacaagtcagcggggtgagagcaacttgaagttctacaactttcccaaggacatcaaaagcttgatcaagtggtgccagaatgcacgacttcccgttcaggcgaaggagccgcgtcatttttgcagtcgccacttcgaggagcgctgtattggcaagttccgtctgaagccgtgggcggtgcctactttacacctaggtgcccaatatggcaagatccacgataacccaaagaatttgtacgttgaagaaaaacgctgctgcctcaacttctgccgccgtagccgatcctctgacttcaatatgtcgctatatcgatttcccagagatgaagttctcctgcgacgctggtgctacaatctccgcttggatcccggagtgtatcgtgggaaaaatcacaaaatatgcagcgcccactttatcaaagaggcgttgggtctgcgcaaactatcaccaggggccgttccgacgcttcatctgggtcacactgataccttcaacatctacgagaacgaattgtggccaccgccaacggcacccaacagtcacagcagtggcctccagcaccagacgcaacaacattcctcgcaacactcactgcagcagcaattgcatagcaaatcgtaccaccggcaatcggcggcctccacgtcctcctccgccagttcggcaaactctcactacgtggatcctgatctaagcgcctcttacctgggcttaggtgccagtggatcttctgcaatgaatgccagcgacagcatggacgtatgttgtgtgcccagttgtgagagcaagaggcacaataatgagaacattacattccacaccataccacgtcgaccggagcagatgcgcaagtggtgccataatctgaaaatacccgaagaaaagatgcacaagggtatgaggatctgcagcctgcacttcgagccctattgcatcggcggttgcatgcgtccatttgcggtgcctacgcttaacttgggtcacgatgacgacgatattcatagaaatccggatgtgatcaagaagttaaacatccgggaaacgtgctgcgtcgccgtgtgcaaacgaaatcgagacagggaccacgcgaatctgcaccgtttcccaagcaatgtgtccttattgaccaagtggtgtggcaatctgcagcgtcctgttccggatggaagtaaacttttcaacgacgccatttgtgaagtgcactttgaggaacgatgtctgcgcaacaaaagactagagaagtgggcagtgccgacactatcgttaggccacgaaaacatcccatacccgctgccaacgccggaacaggttacggagttttactctcgacccactgcgcccaataatggcgaggaacagggagagtgctgtgtggagacgtgcaagagaaatccaagtgtggacgacatcaagctttatcggccgccggaggaagcttccgtgttggccaaatgggcgcacaacctgcagacggagagcagtcaactgacaagcatgaggatctgtaatcttcactttgaggcacactgcatcggcaagcggatgagaccttgggctattccaacactgaatctggcaggcacaatagagaatctctacgagaatccggagcattcgatgctgtacaagcggcggactcacatgaaagccaagcaatcggcttccgtgaagcccacttgggtgcccaggtgctgtcttccgcattgccgcaaagttcgggctctccacaacgttcagctttatcgcttccccaagctcaatcgctccactctggctaagtgggcgcacaatctgcaggttcctatggttggcagtgcccagcgccgtctatgctcggctcatttcgagccgcacgtgctgagcaagaagtgcccggtgccgctggcggtgcccacattggacttgaatgcgccgcccggcttgaagatttaccagaatccagccaagctcaaggctagcaagctgtgtctgcagcgcgtgtgcattgtcgagagttgtcgcaagacgcgggcgcagggcgtccagctcttccgactgccacatagtccaacgcagctgcgcaagtggatgcacaacatcaaaacgcgtcccagagcggcgatgagggcccaataccgtgtgtgttcccgccactttgagacacactctttcaatggccggagactgagcgctggcgccattcccaccctggaactgggtcatgacgacgaggacatctatcccaacgaagcgcaggcctttgcggacgagcactgcgtggtggagggctgcgaggcatccaaggaacagcctgacgtgcgactcttccgctttcccacagaggatgacgatatgctatggaagtggtgcaacaatctcaaaatgaacccggtggattgcaccggcgtacgcatatgcaataaacacttcgaggcagattgcatcgggcccaagcacttatacaagtgggctattcccaccgaggaactgggtcacgacgacgccgacatcgagctagtgctaaatcccaagccggaggacaggtatgtggatcctgtgttcaagtgcatcgtaccgacctgcggaaagacgcgtcgcttcgacgaagtccagatgaacagttttcccaaggacgcgaatctcttcgagcgatggaaacacaacttgcggttggaacacctcagcttccacgaacgcgatcggtacaagatatgcaactctcactttgaggatatatgtattgggaagacgcggcttaacataggttcgattccgactctagaattgggtcacgacgagacagacgatctgttccaggtaaatccggcggagctgcagagcaaccttttcggacgacagcggcgagtacacgacgagtcgggcggtataatcatcaagcaggagttttccgagtcggaggacgtcaaaacggacgtgtctgatgccaaagatttcaatacgagacaggttaagctcagaaagactatgtccgatctgaagtgttgtgtgcgcagttgtgggcgcagtcgactggagcacggagcgcgcctctttccatttcccaccggcaagcagcagcacctgaagtggcgccataacctgcgcctggaacccgacgaggtggaccgatcgacacggatttgcagtgcgcacttcaatcggcgctgcattgatggcaagcagctgagaagctgggcaatgcccacgcaacaactgggccaccaggagcagccgatctacgagaatccgaaaaacataccaggattctttacgcccacctgtgctctgagtcattgccgcaagcgtaggagcattgacaacgatctccgcacctatcgatatccgaggagtgaggatcttctggagaaatggcgggcgaatctgcgtctggcgccggatcagtgtcgcggcaggatatgtgctgaccattttgagtcacaggtgcgtggaaagttgaagctgaaaacgggagcggtgcctactctaaatctgggccatgatgagggcttaatatacgacaatgaggctataaaggtgggcatgaccgaagaagaggaaggcagctcggagatgacacgactgaaacccaaaagagagctgattgatgaagaggaagaagaactagaggctgaggaggagccccatgagcacgatatgtacgatgaagacgagaaggacggccactatttcgatcctctcgaactggtcgagacctttgccgaacatccaagtgacgatgaagccgagtatcgtggagatgaggaggatgagcgcgacgaagatgaggacttggacgaggcggagcactttcatccggacaacccacccactcccccaaccatccctctgcgtcgcgaaaagcccgcgaataatgtgacgcccatttgctgtctaaggcactgcagaaaggaacgtactgcttttcatctacttagcacctttggctttcccaaggatcgccaactgctgctcaagtggtgcgccaatctacacctgaatccggatgactgcatcggccgcgtttgcatagagcactttcagccggaggtattgggaacccgaaagctgaagcaaaatgcggtacccactctcaatgtgggccacgatgagccacttagatactcttgtaatggaatggatcttgaccaggagcaattgcagccacagcactcggtttttcggctttggagcctaaaacactgccgcaaaaggaaactgacggagccgccggacatccgccaaaacaagtggagtgcggaagtgcggaagatgcagagattgaggatggaaatgaagatgaagatagggagggagatcaagctggaggtgcagacggagagggaaatgaagtccaaggaaaagactccaacgacgagtctcggaaagattaagttggaaatatgttgcatcaactcctgtgcgaatgacgacgttaaccaactacttcagctgcctgaggatcaaaatctcttaagaaagtggcagcataacctaaagttatccgtggacacggacttcaaggaaatccaagtgtgtctaaagcactttgaggagcaagtggtgcaaaacggaaagcccttggagcaggctgtacccaccttacagctagatcaaaacagttggaacatctacagaaacagcgggaattgcctgtttccagagtgcagtaattcttcatcggaccagttaagctttgttgatttacctggaaatgcggtcataagagatgcctggatgagtcacctcaatttgccacccagcagtgagggtcttctttgtagtgagcactttatgcaactctttgaacaggtggagtaccccaaggtattggccgcacaagatttggaagacttgcagtggattgttgacgaacttagatgcgctgttcccagttgttcatccaaatctgatggggatcttcagcttatcccttttccgaaaaaggatgctacccttttgaagtggctgcaaaacacaaagatatcttacgatcatttaaagcacaaaagctatcgcatatgtgttcttcatttcgagccgacttgcctagaggcgaattttccgaaagcttgggctatacccaccttgcatttaaaccacgatgacgagcttcatttgaatctcaggcctgaatctcgcagtggtacaccaaacagcaactctagactaactccattgagaattaaaacagatctgacctccttgggaagtccatgctcgagtgcaagtcctagtcctcgaggcaggatcagaatatgttgtatttccacatgtggacagattggaagtagtcaagttcgactctaccgctttcccaccgaagagcaggccctactccggtggctggtgaacacgcagcagcaacctcgcattgtggaccctgcagagctatatgtgtgccaatctcactttgaaccagacgccatttgcaaaaaacaacttcgttgctgggcagaacccaccttaaacctgggccacgacgggtttgttatccccaatgccaagcacaatggaaacattgctgggggccaggatactgaggaggcgatgaggcttatccgggagcgctattgctccgtactgacttgtttccaggctgaagctagcggtgtaagactttatgagtatcccaaggatatgccaactatacgaaagtgggcagccgcgtgtagacatcgctccatgcaggccagcagccatggattcaaggtatgccagtctcacttcgcaccggaatgcttcgagccggacacattaaatttgattgagggatccgttcccactctggagttaagtagaggcgacatcgaaagacactgcctagtgtctggatgtgaaaaggatgcatctgaaggacgtctgcgctattacaaggtgccaaaaaccactgctcaactgaatgcttggagcaacaacctgaagatcagttgccaggacctcggattgggggagcagctcatctgtgagcgtcactttgagcccttttgcttcggtgcccacaaaggattacgccctggcgcactgccgactctcatgctaggccacgacgaagaggtggagatgttaccgaacccagaaattctctggcagaaaaaagccgaggtttgctgtgccactgcatgtggtcgaatatggcagcctggagaccctaagtttagtggatttccaaaaacattggcgttggctaagaaatggattcataatcttcaactgagcgtagaaaatgaccaactgggtagtctgaaagtctgcagtgtgcatttcgaagcctctcttttcaataaaagtggcttaatatcgggttccatacccacactggagctgggccattcctctcaggatatatttcagtcggacatccaaaacatgggtaaaagtttaaagtttgaaaggagagccatagtatcggatcttgattgcatttatcctgagtgcaaggaactgtgcaaaaccgtgtcattcaatctgccccaagaagaagacctacggacagcgtggctccgtcatttgaagatcaaagagccgtcgagtggtgtcggtcagctatgcccactacactacgttattctttacgagctaagtatcaaaagttttccggagcacgtttcaaaccgatttcttgaagaaaactactattctgctcgaaacaacaggcgcgtcaaaatcgttagttgcgcggttaaaggttgtgaaatgatcaggccgcgggataaggtgctcctgcacgggttgccgcaaaggaaggacatactgagaatgtgggttgagaatggccaactggagattacggagccgcagcagcaatatatgcttagggtatgccgcaatcactttgagtcccgatgttcgtttgacgacaggcggctgcatccgtggagcgttccaactctgaacttacctggaaatccggtgcatcaaattcccactaaggaggagtggcaggaaatgacgataaaattgacccaggaagccgatacaattaaattggagagagaggaggaactggaggagcaagagccgctcgaggaggaagcgggtgactgttctcttctagagcctattgtaagaatggaacacatcgagtccgatgaagaagactctgagatgcaggctctggaggtccttctggaggttggtcacgttgagcggatggacagctacgaaagagtggacgagtcatataccgaacaagccgtctaccaatctaatggcgttcgaaaccagtacaatgccaaccactgcgccgttgaaggatgcgaagtgaccgttgaggacgtgggcgggaccatcaagctgcacaagttccccgcatcttcggaggccgctaggaagtggatgcacaacacccaagtcgatatggatgagaagttctggtggcggtatagaatttgcagttaccatttcgagcaggagtgctttcagagcgccaggataaagaagggagcgatgcccactcttctcctgggacctaagagaccggataaggtgtacgacaatgaattcgcattgcaggagactgaggagctcattttgcctgaagaccttgagtttgaggatacaaaaaagccgaaaagggaggtaataaaactgtgtctgccaactccggctccgccacgaaagtccagtaagttttgtcagatcgagggatgtatgaatcacctgaccactgaaaacataacgttgcacaaatttccccattcggaggacatgtgcctcaagtggcagcacaacacgcaggtgcctttcgatcctttccaccggtggcgataccggatatgtagtgtccattttcatccggtgtgcttgcttaacatgagactagtccatggcagtgtgcccacattaaaactaggtagcaagtctcccaccgaactgttcgacaacgacttcgaagccattaacctcaggctggacaagaagttggggactgaccacagtaccgtgcagataaaggaggaggatgaagattcaatgccgtccctggaaccagaaccgcagcttcacgaagaccaagaggtggaggactcagaagctatgcaaatacccttaaaccagacaaattggaagggccaactgcgtttgcttgtgaagcaggaaaaggtgacctacaaccaggtgaagtcaggatacgataagtgctccttaagtcattgccagcggcagagatctaagcatggcgtccacatctacaagtttcccaagtcgaagctccaacaggagcgttggatgcacaacctccgcatccgctacgatgagcgaaggccatggaagtttatgatctgcagcgtgcatttcgagcctcactgcatcagcctgcggaagctgcgcgcctgggcagttcccaccctggagctaggcgataatgtgccggagaagatctttacgaacgaacagtgccatgaactctccaccgatcgcagcgaggcggagagcgatgccgatgaggaggacgggctgcaggaggacgaggaggaggaggatgactacgaagaggaaatcggcccggaggtgcgcatcaagcgggagcggcgttccaagctggatccttggccacccgggcaggttccgccgtggaaagttaagcagtgttgtcttccttactgccgagccttccgtggcgatggcatcaaactgtttcggctgcccaacaaccgaacctccatacgcaactgggagctggcgacgggcatggtgttcaaggagtcgcaacgaaacactcgcctgatttgcagccgacactttgaacccgagttgattggcgtaagacgtctcatgcgaaacgccattcccacgaggcacttaagtccccaggcaccatccgatgaagtgaagagaaagccggatcctccactcccaatcgcaacctgttgcatggctgactgtcatcataatggaaatgttaagctgcacaagtttcctagtgacccagcgctacttaggcagtggtgccaggcactcaggctcacggatacccagaggtaccggggcaaacatatctgctcggtccacttgcccaccgacaggacggtcagctgcgtcatctgcggagtggaaaacgcccagttgccgatgctggactttccagagcagcgcaatcagcgagccaagtggtgctacaatctcaagatcgaggccatacccaagtgggaccactccaagcacatctgctgtcgtcactttgagtcgcattgcttcctccagccgggtgaactgcgtccaggtgcaatacccacactgcagctgaaccacgacgacacgaatatattcctcagcgacttcgccactagtccgaccggcaatcggatcaaggacgagccgctggacaacgacgacatgctgctggtttag

SEQ ID NO: 42732 - protein, 3781 aa, DROSOPHILA
MSQQHPHHAHPHHYAHHYPPPVTPMSLQQQQQQQQHQQAQLSPQQQQQQHANWYSHVASYPTPHSAFGPAPAPSCKAANNSGSGNNNNNIMGGGGYGPGGGGAQGYYGAAGGGLNVSGAVVGGGGPNYGLGANTVAYAHNQLLQYQQQQQQQQQQQQQQQQQHQHQHLPQHISQQRPYMGHNIMTGSYPYIKSEPMEAYQQPPNPMAPPPAPEVLIKSEPIDEHSYKSNYIDDNTPFADFSKFSEFSEDMLSPKVELTVKDESYGRTTSSFLRRKQQSDRGNESLPICQRCKEVFFKKQVYLRHVAESNCGIQEYDFKCSTCPMSFMTTEELQRHKLHHRADRFFCHKYCGKHFDTIAECEAHEYMQHEYDSFVCNMCSGTFATREQLYAHLPQHKFQQRFDCPICRLWYQTALELHEHRLAAPYFCGKYYTGGQSSSASQSQAQQHQTNYKLQDCHMATMEMPTTPHHKTTPSGSSLPATAALNSLLQQRQANADGAAMFAASAMKNEVNVKMERSYSNSTSESSYSVQDSGYNNAYGSDSSMHAGAIAGPQAHSSTLDDSEDALCCVPLCGVRKSTSPTLQFFTFPKDEKYLNQWLHNLKMFHIPAASYANFRICSMHFPKRCINRYSLCYWAVPTFNLGHDDVANLYQNRELTNTFTTGEVARCSMPHCTSQRGESNLKFYNFPKDIKSLIKWCQNARLPVQAKEPRHFCSRHFEERCIGKFRLKPWAVPTLHLGAQYGKIHDNPKNLYVEEKRCCLNFCRRSRSSDFNMSLYRFPRDEVLLRRWCYNLRLDPGVYRGKNHKICSAHFIKEALGLRKLSPGAVPTLHLGHTDTFNIYENELWPPPTAPNSHSSGLQHQTQQHSSQHSLQQQLHSKSYHRQSAASTSSSASSANSHYVDPDLSASYLGLGASGSSAMNASDSMDVCCVPSCESKRHNNENITFHTIPRRPEQMRKWCHNLKIPEEKMHKGMRICSLHFEPYCIGGCMRPFAVPTLNLGHDDDDIHRNPDVIKKLNIRETCCVAVCKRNRDRDHANLHRFPSNVSLLTKWCGNLQRPVPDGSKLFNDAICEVHFEERCLRNKRLEKWAVPTLSLGHENIPYPLPTPEQVTEFYSRPTAPNNGEEQGECCVETCKRNPSVDDIKLYRPPEEASVLAKWAHNLQTESSQLTSMRICNLHFEAHCIGKRMRPWAIPTLNLAGTIENLYENPEHSMLYKRRTHMKAKQSASVKPTWVPRCCLPHCRKVRALHNVQLYRFPKLNRSTLAKWAHNLQVPMVGSAQRRLCSAHFEPHVLSKKCPVPLAVPTLDLNAPPGLKIYQNPAKLKASKLCLQRVCIVESCRKTRAQGVQLFRLPHSPTQLRKWMHNIKTRPRAAMRAQYRVCSRHFETHSFNGRRLSAGAIPTLELGHDDEDIYPNEAQAFADEHCVVEGCEASKEQPDVRLFRFPTEDDDMLWKWCNNLKMNPVDCTGVRICNKHFEADCIGPKHLYKWAIPTEELGHDDADIELVLNPKPEDRYVDPVFKCIVPTCGKTRRFDEVQMNSFPKDANLFERWKHNLRLEHLSFHERDRYKICNSHFEDICIGKTRLNIGSIPTLELGHDETDDLFQVNPAELQSNLFGRQRRVHDESGGIIIKQEFSESEDVKTDVSDAKDFNTRQVKLRKTMSDLKCCVRSCGRSRLEHGARLFPFPTGKQQHLKWRHNLRLEPDEVDRSTRICSAHFNRRCIDGKQLRSWAMPTQQLGHQEQPIYENPKNIPGFFTPTCALSHCRKRRSIDNDLRTYRYPRSEDLLEKWRANLRLAPDQCRGRICADHFESQVRGKLKLKTGAVPTLNLGHDEGLIYDNEAIKVGMTEEEEGSSEMTRLKPKRELIDEEEEELEAEEEPHEHDMYDEDEKDGHYFDPLELVETFAEHPSDDEAEYRGDEEDERDEDEDLDEAEHFHPDNPPTPPTIPLRREKPANNVTPICCLRHCRKERTAFHLLSTFGFPKDRQLLLKWCANLHLNPDDCIGRVCIEHFQPEVLGTRKLKQNAVPTLNVGHDEPLRYSCNGMDLDQEQLQPQHSVFRLWSLKHCRKRKLTEPPDIRQNKWSAEVRKMQRLRMEMKMKIGREIKLEVQTEREMKSKEKTPTTSLGKIKLEICCINSCANDDVNQLLQLPEDQNLLRKWQHNLKLSVDTDFKEIQVCLKHFEEQVVQNGKPLEQAVPTLQLDQNSWNIYRNSGNCLFPECSNSSSDQLSFVDLPGNAVIRDAWMSHLNLPPSSEGLLCSEHFMQLFEQVEYPKVLAAQDLEDLQWIVDELRCAVPSCSSKSDGDLQLIPFPKKDATLLKWLQNTKISYDHLKHKSYRICVLHFEPTCLEANFPKAWAIPTLHLNHDDELHLNLRPESRSGTPNSNSRLTPLRIKTDLTSLGSPCSSASPSPRGRIRICCISTCGQIGSSQVRLYRFPTEEQALLRWLVNTQQQPRIVDPAELYVCQSHFEPDAICKKQLRCWAEPTLNLGHDGFVIPNAKHNGNIAGGQDTEEAMRLIRERYCSVLTCFQAEASGVRLYEYPKDMPTIRKWAAACRHRSMQASSHGFKVCQSHFAPECFEPDTLNLIEGSVPTLELSRGDIERHCLVSGCEKDASEGRLRYYKVPKTTAQLNAWSNNLKISCQDLGLGEQLICERHFEPFCFGAHKGLRPGALPTLMLGHDEEVEMLPNPEILWQKKAEVCCATACGRIWQPGDPKFSGFPKTLALAKKWIHNLQLSVENDQLGSLKVCSVHFEASLFNKSGLISGSIPTLELGHSSQDIFQSDIQNMGKSLKFERRAIVSDLDCIYPECKELCKTVSFNLPQEEDLRTAWLRHLKIKEPSSGVGQLCPLHYVILYELSIKSFPEHVSNRFLEENYYSARNNRRVKIVSCAVKGCEMIRPRDKVLLHGLPQRKDILRMWVENGQLEITEPQQQYMLRVCRNHFESRCSFDDRRLHPWSVPTLNLPGNPVHQIPTKEEWQEMTIKLTQEADTIKLEREEELEEQEPLEEEAGDCSLLEPIVRMEHIESDEEDSEMQALEVLLEVGHVERMDSYERVDESYTEQAVYQSNGVRNQYNANHCAVEGCEVTVEDVGGTIKLHKFPASSEAARKWMHNTQVDMDEKFWWRYRICSYHFEQECFQSARIKKGAMPTLLLGPKRPDKVYDNEFALQETEELILPEDLEFEDTKKPKREVIKLCLPTPAPPRKSSKFCQIEGCMNHLTTENITLHKFPHSEDMCLKWQHNTQVPFDPFHRWRYRICSVHFHPVCLLNMRLVHGSVPTLKLGSKSPTELFDNDFEAINLRLDKKLGTDHSTVQIKEEDEDSMPSLEPEPQLHEDQEVEDSEAMQIPLNQTNWKGQLRLLVKQEKVTYNQVKSGYDKCSLSHCQRQRSKHGVHIYKFPKSKLQQERWMHNLRIRYDERRPWKFMICSVHFEPHCISLRKLRAWAVPTLELGDNVPEKIFTNEQCHELSTDRSEAESDADEEDGLQEDEEEEDDYEEEIGPEVRIKRERRSKLDPWPPGQVPPWKVKQCCLPYCRAFRGDGIKLFRLPNNRTSIRNWELATGMVFKESQRNTRLICSRHFEPELIGVRRLMRNAIPTRHLSPQAPSDEVKRKPDPPLPIATCCMADCHHNGNVKLHKFPSDPALLRQWCQALRLTDTQRYRGKHICSVHLPTDRTVSCVICGVENAQLPMLDFPEQRNQRAKWCYNLKIEAIPKWDHSKHICCRHFESHCFLQPGELRPGAIPTLQLNHDDTNIFLSDFATSPTGNRIKDEPLDNDDMLLV

SEQ ID NO: 42733 - DNA, 4872 bp, DROSOPHILA
tgcggcagcaggagcaggtgtttctgcagtctttttagcctgggcttccgtatcatcctcggcttcctcagccaaactgctacgctgcggctgaacttcggcgtaaatggcgggaaactgcgactgtagcttctgcttgatgatccgtatcttgcggaatatgtaatccagatccttcttcatttcgctcaggcatttcacgtgtcttttgaaatcctcgctggcacttttcaaacgactctgcgataaggcattgcagttgagcagcatctcgttggttttctcaaagcgttgcagcctgtgggatatattttggatgtttattataatctctggttaaatgaaatggcttacatttgcttttgagcccgtatcatggtctccacatcgccctgattcaccattcctgcgagactttgaatgaaggcctcggcggcggagttgccgaagccagtgaaggattccaggtcaggagtggcatcctcggactggtgcacatccgcaaggcccaagtggctcattgtagcctagaatttatttgtttataataagggagaacacaaaaattgatttgtttacttgcttttcaaggtctcaaggtttctttgcgacaacttgaactctgctttgtgtgcgtttgctggcagttttagttttttctatttttatttacgttttcaaatggatctcatgtttccatctattttaaaagttcttttgtttagatttcttaaaaaaaaagatattttcgtaacagctgtttaagtactagttataaaccagtgctgcaagctgccaaaatgcaaaagcactgccgtaattaaatttgaacattttactttttaacataaaattaacactgttttatgacaacatttgttcctatttaatataaatcaaagtttctttagctatttaaacacttaaaaatatttaaataataaagcttagcagaatggcattgggtatttttacgcaaagccgttttggtcacactatgctcaccggctttttttttattaagcgattgaatttccttatttattcttgatttaaacgtgcaaaatgaagctcgctccgactgttaagctaaacaatggctacgagatgccaattctgggcctaggaacctacaatgtaagtccttatcatcggcgatgctaataaatcagcaggcagaaattgtttatggaaatttctaccattcaattccaattaagtgcaattgtgaaattgaaagttaattatgttatctgtagttaaagaagtctcgctgtgaggctgccgtgtgccacgccctcgaaatgggctatcggcatatagacaccgcatatctgtacaggaatgaaggcattataggcaaggttttagctaaacttattggcgaccagaaactgaaacgcgaacaggtgtttctggtcacaaaggtaggatatagtacagatgggttatatatagttaccagcacatgtaaatagatcgaaaatcaatatccaattagctgtgggacatataccacgaacccaagatggtgaaatacgcctgtgatatgcaattaaagctactgggcgtggactatatagatctatatctgatgcattcgccggtgggcgtggactacatctctgatgaagatctgatgccccacgagaatggccagctgaggaccaagtgagtttgggatacaactaaacatacatagtttagattcaagaagcttaaagaaactgatctttggaacttatagcgatgtggactatgtggacacctacagaagtatggagcaactggtgcatctggggctggtgcgcagcttgggattgtccaactttaatgccaatcagctgaagagattactggaaaactgccaaatcaagccggcaaacctacaaatagaatgtcatccggaattggtgcaagtcccattaattgagctctgtaaatttcacaatatcaccgtggttgcctattcgccactggggcgtcccaaagcctgcaatccgctgcccgattactacactgattccaagctactggcgttggcagcgaaatacggcaagacaccagctcaaatcatcctaagatacttggtataaacgaccttagaattgtaaagtgataaagatatttattggctaaaaatctacagatcgatattggcacggtacctattccaaaagctgcccagcgagcccatctcgtagagaatctggatatatttgatttccacctaacgccggaggagttgctccaaatgaagacctttaatacagggcgcagaatctggaaattcgataaagcgaagaatcatcagtactatccgtactagcaagagatatttagtgttcggaaaaaaagtgtaactatgtaaatgtataagatagaatctcgttagatagtttagtttttacgttagtttttttttagtacaatattacaatgttataaaatgtcatcatatcaatcgttatcatatataaatatactatattttgtgctagatatgatcctattaacattttaagtgctcacctggggaaataattatttgtatctctctaaatgtctctatcaaagtttatcgaatctttcgtgtgccttgcgacgttgatcagttgtataatttcggatattgtttcgatttgtcaattcgcggctctccgatatgctcacaatttcctggccgaaacgaacgtgttgctgtggtcgaaaataacaatatactgatctcaagagtcgcattataaaacacatatttgattctgtcagaaaggagaaaggttaatgatgaatttgatattctctatttgcagtcgaaggacaacgaaggcgaagccgctgtgaaacatgcgattgatgtgggctatcgtcatatagatacggcctatttctaccaaaacgaggccgaagtgggcaaggcgattcgggacaagatcgcagaaggtgtggtcaagcgagaggatatatttttggtcactaaggtaaatgccatgatgatatgttctagatctatcaataagattatatttttgcgcagctttggaacattttccacgatccagagcgcgttgagggcatttgccgcaagcagttaagcaattttggcttggactatatcgatctgtatctgatgcatatgccagtgggctacaaatatgtagatgacaacaccctgctgcccaaaaatgaggacgatgtgctccaactgagcgatgtcgactatctggatacgtacaaagccatggaaaagctggtaaaactgggcctggtgcgcagcatcggagtatccaacttcaacagcgagcagctggcacgagttttggccaactgcgagatcaaacccgtcactaaccaggtggagtgctcgcctgcgctcaaccagaaggctttgacagccttctgcaagaagaacgacgtcaccttgacgggctacacgcctttgggaaagcccaagccggatattcagaagccggactttatctattcgccggaggtggctgttattgccaaaaaatatggcaagactacaccgcagattgtgctgcgttacctggtaattgaggcatcaacctgacctcagcgacagcatctaattaaaatctctcttttcgcaggttggtctgggtgtcattcccattccaaagtcatcgaatactaaccgaatttctgagaacttcgatatcttcgattttgagctgacagccgaggaaatggccgttctcgatggttatcacactggcgaacgggtggtgccattaaatttgattaagggcctcaaccacaagtactaccccttttcaattgagttttaaaccagatgagcgccttgttgctgtatcacgaatataatgtaataaatttgtcattacatcaatctctatgacaacaaattgaatgcacgaatgtatctgcatacttattccaaacccaaatccaacacaaagctcttagtgccttgatgttctccatgaaatccgtccagttgccaacgatccgatccgcaccccaccgtggaacttattcccagaaatgaggagcaaatggaagcatcgatctttggcacggcacgtttgacatccaagctaaaaggtgaaaatgtttgaataagaccgaaatattaagtattaagcttttacgaccaatggtaatgcgaagtgctcaaacttggagatcaccaatggagattcaaatttaagttacatgtggaaaaaactgtatacctgcattatttcaatcatttcaatagttgttcagcttagacattgattaatgaactagtgatatttttagaaggtgcttcaagcttttctacagtaactttagatatagaaaatagaaaaaagtttagtaagtaaataagacgtaaaaaagcatatggatttaagatggatatgtgatttaaaaaacgttcttttagaagaacttgtgctgattgccagctgttagcctaaattgctacatcaattttaaggacgcattttttgtttgccaacattctcttatcaatggatcttctattctgatgtatggccaaaaaatatcacgcggaagctattagttgcgccaaccgcagaaatgaagcatgaaagtattatggctattagttgatgtacctattacgcccgacaggctaattatctttggattgttgggtacattttgggttaatcgcgccgccgtagacctttgtaaatagcacctcggcctgtggggtgacgtcagagccagccaagatgagcacgggctgaatgaaattggggtcgtctagcctttgagctgccccaaaatagtgcatggatgagtgaattaaatagcggaccggacttggacttacgtgctgctccacgagtcgattagaggagaatctgtggc

SEQ ID NO: 42734 - DNA, 1079 bp, DROSOPHILA
ctcaccggctttttttttattaagcgattgaatttccttatttattcttgatttaaacgtgcaaaatgaagctcgctccgactgttaagctaaacaatggctacgagatgccaattctgggcctaggaacctacaattcgaaggacaacgaaggcgaagccgctgtgaaacatgcgattgatgtgggctatcgtcatatagatacggcctatttctaccaaaacgaggccgaagtgggcaaggcgattcgggacaagatcgcagaaggtgtggtcaagcgagaggatatatttttggtcactaagctttggaacattttccacgatccagagcgcgttgagggcatttgccgcaagcagttaagcaattttggcttggactatatcgatctgtatctgatgcatatgccagtgggctacaaatatgtagatgacaacaccctgctgcccaaaaatgaggacgatgtgctccaactgagcgatgtcgactatctggatacgtacaaagccatggaaaagctggtaaaactgggcctggtgcgcagcatcggagtatccaacttcaacagcgagcagctggcacgagttttggccaactgcgagatcaaacccgtcactaaccaggtggagtgctcgcctgcgctcaaccagaaggctttgacagccttctgcaagaagaacgacgtcaccttgacgggctacacgcctttgggaaagcccaagccggatattcagaagccggactttatctattcgccggaggtggctgttattgccaaaaaatatggcaagactacaccgcagattgtgctgcgttacctggttggtctgggtgtcattcccattccaaagtcatcgaatactaaccgaatttctgagaacttcgatatcttcgattttgagctgacagccgaggaaatggccgttctcgatggttatcacactggcgaacgggtggtgccattaaatttgattaagggcctcaaccacaagtactaccccttttcaattgagttttaaaccagatgagcgccttgttgctgtatcacgaatataatgtaataaatttgtcattacatc

SEQ ID NO: 42735 - protein, 317 aa, DROSOPHILA
MKLAPTVKLNNGYEMPILGLGTYNSKDNEGEAAVKHAIDVGYRHIDTAYFYQNEAEVGKAIRDKIAEGVVKREDIFLVTKLWNIFHDPERVEGICRKQLSNFGLDYIDLYLMHMPVGYKYVDDNTLLPKNEDDVLQLSDVDYLDTYKAMEKLVKLGLVRSIGVSNFNSEQLARVLANCEIKPVTNQVECSPALNQKALTAFCKKNDVTLTGYTPLGKPKPDIQKPDFIYSPEVAVIAKKYGKTTPQIVLRYLVGLGVIPIPKSSNTNRISENFDIFDFELTAEEMAVLDGYHTGERVVPLNLIKGLNHKYYPFSIEF

SEQ ID NO: 42736 - DNA, 4185 bp, DROSOPHILA
gatgatgattgatttgctgaaaaaaagagatcctgctaccttagcgcagggtcaacttatcatagcgttagccctgaccactctcaaggataaggaatcctacaccttcttaaattgtgttcggctctttgtgtcgcttgttcatgtgatggagtccgatgtgctggacaaattgagtgatgagtacctatcagagacggctcacttagactaccgcctcgtagtgggtgaagctattctgaaagtcgctcaggagttgggtaagcaatgttctacacagctaagaataactcctaaactttcatactaatcccatccaggtcctctttgctttcgatacaaggctgttcttctcaactgcttcatgtacggctcccggtctcctgttcacgaattccggatgtcagcctttgccaatcttgcccagctttgtcgccttttggcctttcaagtgcagaacttcttccacgagttactccaacttgttaatagcgaattaaccaccggaggatatgttccctctaagcgtgcagcagtcctggtcttagctgaactattaaacggcatggagaaccttctggattaccaggaaatgttactccccatttatcgccttttaaaagcgattgaagcggatgaatcctgtgatcctcaaatgcgtcagcatgctgcaaacggtctgaaaattttaaacaaaaagtgcacaaaactgatacaatctgccttggaggagaaatcattacagaagcagattaaggtgttgggcattaaggacgatgattcacctcaaagaagaaaccgacatatactggaactgaattaaaggctatcttagaaacctacacaagttttaattttgttttatacacaatagatcaatattacagtttcgaaaagaaatgcgatagtggcgaatcagtacagacattactgacataaaggcagaacagaaaataggacttagttttggactttggttacattatttgggatagaggcatcacttgccgatagagaactcattctcgatcttgtctgcgatcatcttggcaatggccaagctactagtagcgcccggcgatggggcgtttctgcagtgaagcactcgcttggctagcgctcccgatccttgtccgcgatcgaaaacaaaatcgtccaccagattgccatccagatccattgcttgggcacgtactccagcgggaccacgctggatatcgtactccgtaatatccgggatgtacttctgcaacgccttgatctgcaggttaatgaaccacgatttggacatctcgctgagtccgaaaccgatgtacttgctcgccatctttacgaagcccggatagcgcagggcgtcgaaaagctcgaaaagattaatgtcaccccagctggaagaagtgaagtgtcagacaagtttaaatatgagctctaagaagacttacgtgtaaccttcgcgtttcagagccagaacggcatttggtcccagccagatagatccgtccattcgcggcgtaaagtgaactcccaggaaggggaaacgtggatccggcaccggataaatattacccttgaccatatgctgtttttccttggtcagcagcagatactctccacggaaaggcacgatgcgggggtctctggggcatccagtcttctcagccagcaggtcggattgcaaaccgccacaggttaatacgttcttggtacgaaccgtttgaccgggcttagcgccatggatggtcactgggtagtcggtgccctccttggtctcggtaaacttgctgacattgaagtccaggtagatatcaccaccgcactgtttgaaatcctgaccataatgctcggtaaccaatccccagtcaacgataccagtgtgcggactgtggagcgccatcactccctggcagtagggttcgatctcctgaatctcgctgccttcgatcattcgcagatccggtacgttgttggcaatgccacgcttctccaaatccttcagcagcttcacttctttctcatccgtggccacaattagcttcccggttttcttgtacgggatctttttttcatccagataagcgtaggccaaatgcatgccctccacgcaaaggcgggctttcagggttccaggcttatagtagatgccagcatggatgacgccggagttgtggccgctctggtgctttgccagcttgcactccttctccaggacagccactttgagggatggatggcgcaggacaatctcccgggcagatgcggcgccgacgatgccaccaccaacgacaaccagatcataatctctgagggaatacaaaacatatcagctaacagcctcaaaaattaaataaacttaagacttctaaagtttttaaaagttagaaagatgtttgtatatccgttagagtaaagagtgtgcgggcacgtttttgattaggatcatcagtcaagtcgatctagccatatcaatatgttcatcgactgtcagaccgcaagaacgtcgagatcttgggaactaataagtaagataaaggctgcagattgcagtgaaaagactatgctatgcaattaagaatacaaaagtaaatagaatatacattgcttaactaaacatgattttaaaagcgcattctaaatgaaaagaagcttacttagctcatttggaacacctaaatgatattctgcaaacagtgaaaagattcttaggatcggaacacccccgaaaatgagagaaccctatcgtaatctcaagagacttacccgcagctcgacgagctgtgctgcgatcttttgtgggtcgctgtggattcgttgggcgcggccacgcccacattgagtaggctacgccgaagtccctgtaccagcagtcgcacctgagccatttctctttcttttatgctttcaccacccgcgcacgcacgtagaatttagattatttaccaacccgaaaagaaagaccttgcttgaccttgccttctcctccgccaacttgtgcgtacagcgcgctttcgagcgaatcgacagactgaagcccgtggaagttttccgtggggcgagagaaaataaatatgctcacgggccgagcatctgggcgatttgtggggccgaggggcgatcataaacgcgctaattgataagtgtgacggattatttttgaaagggggtggttgggtaaggacgtgtgtgtcagctgttcggtttgttgataagatttaatgtgcccagctgccattttgcaaattttctgtaatctaacaatattaaaatttttatttcattttaaatatttcaggttatacgatcatgctgattactcgactaaaaagtatttacaagaaacaaacatataattttaaccctaaatttgcttttattcgatacggaatcccattatatttggtcgtatttgatagcaaacacaaatgaataaagtttcgttattaattcagaactgcaagaaaaaagaccgctatcaacaatatgtgagacgcattttccaacactgaacacttcagaagcaaaacaaaaccagctgatttagcaaacaacagctagctcacagatgtaaacaacagaaatttgcaaattattacaaattattgtaccataaataccttaagatgcccgcccactgcgccgtgataaattgcagccataagtatgtgcacgcgggcagcatttcatttcacaggtaagtgagttgattttcaattgacaagattacactatagcttctattctcccaaagatttccattcaaacggaaggatcttctacagaaatggaaggaatttacccagaggagtgctcagtggatgccctcaaaatggagtgcgctgtgcagtcggcactttggtgatgaggactttaattgcagcaataatcggaaaacgcttaagaaaaatgctgtgccatcaattagggtttcggaagatgactccatgagtgggcacttggaacaggtgtccccaagcaataggccaacgcacaagcaaactctttctagtgccgccgaatcagcagcaacaggtgttaaagccacttgccgcttttgtggttcctcggccatcaattgctcctcgtttgacaagagttttgagctctttggcatgatccagaagtgctttcctacgctacagattcttcaggacgacaccttgcccaaggaaatatgccaggagtgctgcc

SEQ ID NO: 42737 - DNA, 1674 bp, DROSOPHILA
gacacacacgtccttacccaaccaccccctttcaaaaataatccgtcacacttatcaattagcgcgtttatgatcgcccctcggccccacaaatcgcccagatgctcggcccgtgagcatatttattttctctcgccccacggaaaacttccacgggcttcagtctgtcgattcgctcgaaagcgcgctgtacgcacaagttggcggaggagaaggcaaggtcaagcaaggtctttcttttcgggttggtaaataatctaaattctacgtgcgtgcgcgggtggtgaaagcataaaagaaagagaaatggctcaggtgcgactgctggtacagggacttcggcgtagcctactcaatgtgggcgtggccgcgcccaacgaatccacagcgacccacaaaagatcgcagcacagctcgtcgagctgcggagattatgatctggttgtcgttggtggtggcatcgtcggcgccgcatctgcccgggagattgtcctgcgccatccatccctcaaagtggctgtcctggagaaggagtgcaagctggcaaagcaccagagcggccacaactccggcgtcatccatgctggcatctactataagcctggaaccctgaaagcccgcctttgcgtggagggcatgcatttggcctacgcttatctggatgaaaaaaagatcccgtacaagaaaaccgggaagctaattgtggccacggatgagaaagaagtgaagctgctgaaggatttggagaagcgtggcattgccaacaacgtaccggatctgcgaatgatcgaaggcagcgagattcaggagatcgaaccctactgccagggagtgatggcgctccacagtccgcacactggtatcgttgactggggattggttaccgagcattatggtcaggatttcaaacagtgcggtggtgatatctacctggacttcaatgtcagcaagtttaccgagaccaaggagggcaccgactacccagtgaccatccatggcgctaagcccggtcaaacggttcgtaccaagaacgtattaacctgtggcggtttgcaatccgacctgctggctgagaagactggatgccccagagacccccgcatcgtgcctttccgtggagagtatctgctgctgaccaaggaaaaacagcatatggtcaagggtaatatttatccggtgccggatccacgtttccccttcctgggagttcactttacgccgcgaatggacggatctatctggctgggaccaaatgccgttctggctctgaaacgcgaaggttacacctggggtgacattaatcttttcgagcttttcgacgccctgcgctatccgggcttcgtaaagatggcgagcaagtacatcggtttcggactcagcgagatgtccaaatcgtggttcattaacctgcagatcaaggcgttgcagaagtacatcccggatattacggagtacgatatccagcgtggtcccgctggagtacgtgcccaagcaatggatctggatggcaatctggtggacgattttgttttcgatcgcggacaaggatcgggagcgctagccaagcgagtgcttcactgcagaaacgccccatcgccgggcgctactagtagcttggccattgccaagatgatcgcagacaagatcgagaatgagttctctatcggcaagtga

SEQ ID NO: 42738 - protein, 455 aa, DROSOPHILA
MAQVRLLVQGLRRSLLNVGVAAPNESTATHKRSQHSSSSCGDYDLVVVGGGIVGAASAREIVLRHPSLKVAVLEKECKLAKHQSGHNSGVIHAGIYYKPGTLKARLCVEGMHLAYAYLDEKKIPYKKTGKLIVATDEKEVKLLKDLEKRGIANNVPDLRMIEGSEIQEIEPYCQGVMALHSPHTGIVDWGLVTEHYGQDFKQCGGDIYLDFNVSKFTETKEGTDYPVTIHGAKPGQTVRTKNVLTCGGLQSDLLAEKTGCPRDPRIVPFRGEYLLLTKEKQHMVKGNIYPVPDPRFPFLGVHFTPRMDGSIWLGPNAVLALKREGYTWGDINLFELFDALRYPGFVKMASKYIGFGLSEMSKSWFINLQIKALQKYIPDITEYDIQRGPAGVRAQAMDLDGNLVDDFVFDRGQGSGALAKRVLHCRNAPSPGATSSLAIAKMIADKIENEFSIGK

SEQ ID NO: 42739 - DNA, 10902 bp, DROSOPHILA
gaagggttcgcagcgggaatgaaattggcgctagtcaaggttacttacaataagtaatttaacctaattaaaccgacgcttcattgagcaggaacgaggtttcgcaaatcggaacaacatttttgaaaaggttgaaagggggaaaactaaaggcgatcttaaatattttgtattatatacatttatttatttaaattgcagtataagtttgtagtaaacgttctctaaaagtacgtgtattttcttgtgtattcgtatttaacgcattagtattgcttaaatcgctaactttaaacgtgaaatactgaatcgaaacttattgttttactttaggctgatccaagcaaaaaactaagattgactgccaacataggattagtatatacaaagaaggttgaatttcacaagtttatttgcttaatataactatcaattttatttttaacaaaactaaaacgaagaacataaaaatggcactaaaagtacaaaatcataaagtaaaaagcatacattttggagaaccctcaaggataaacgtaattcaacaatgaaattttgcgcaacaccaaacaataaagtagttcttaatctaaaacattttaaacttaactaaaggttaactataaatacgcttttggtatgatcgttattaatgtacgtatgtatgcatatgtccctggctagagtggctcagtttggttggttttaaaaaaatatatattagaaattgaacgttatattttgttacttgataagttgtgatgggtacttcaaagatccaaaacaaacattagtcaaagataacattcaattcccaagatgtttttgccagcaaatcgagtttttatatgtatggggcgataagtatgaatataattagagtatgtgatgcttgaaaaatgcttgtacgaagcgtatcctcttctcccgggattagttccacattcgattaacctacgccagataattactcgctagactaagggcgaacctaagtcctctactggaagatcgctgcccgctgctggaactgctgacgccgctgggcccgctcctcctcctctcgccggcgctcctcctgctccgcccgaatctcgtcgtggaacttgttcgtccgcagctgttgctcaattttcgcctcgaagaagttcttggctccgctcactcccacctgctccacatcgacctccgtgaggcgggccagctgattcagcccagaatcggagtccagttccccggcctgggccttcctgaagatcagcaagaactctcggaatgaaatcttgccatcgttatcctcgtccacctcggcaatcatctgcttgagtcccagatgggtttgcggagcgcccagcttctccatcatgaacttcagctcctgcaggtccaagaagccatcacgagccgtatcgtatctggaaaagcgaaaggtaaacagatgcaaatcaattagtcagcactctgggaatcgaaaaaaaggggaagggtgagagtgagcacatttgccgctggtcattgaccaaccgcaagacacgagactcccaatgtcggggattagcaatcgataatgcaaacgtgggtgcactggcgtcaaaggtcgcgtggcacgatgtctgcgaatatggtgggtggcagggaattatggtcggcggccaacccaatttcatgctaaatttgcaaacaacagcggcgggcacattaatagcacccaggaatagacccataatctacacgacagcgtgtagggtcaaatttcttcggttaatgtggagattatcatatcggtaacagaacatattaatatcaaaatattaaatatggtttttaattgttttgtgactctataaaagaagcagagtgctttgccttagtattctaattgaattgatgggaattgcaaacattgttgatcctaagctgtttttgtcagagtttaaaaaaagcattaactcctatattttggctaataaacagatacatcgtgcacaacttgattttggagaatttccctcacgattcccgttcgccatttatcgccagttcgacgaccaaaattggcgagtcaagagttcaaacttccgccaaagtgtgggcaggaaatagcgatggaaatgtaaataaagcccatttactatataattgtgtaatatattaaaagagaaaacgcaagaagcacgcgctgtcgtctgaataaatcgcgtgttgctgcgggcggcagatgagccacacttgccacacgagcaacagcatccaaagtggcggaaactagttgcacaggctccaaaccagcgaccttgcgagctaggcgaaggatgctgctgcttatgatgatcatcgccagctgaaactagttaaactagttagagctcttgctaaaaatacgatcagcaaaaggaagcagccacttcatatgacaatatatacccattacccacgatcggccgccacatgtgtgtgtacaccttgatgttatccaatagtcgcaactttcagtttcgatttctcgctcgcctagaagccgccacctaatgacgaaatagtatctattagattacagccgccgagcaatggaagtttcgctttcgtttcattaataattgaatccatatcgacaaattgcgtgctttcatgattttgcggcaaaagaaggcgagtgaaagtaattagccgcgatgcaatgaaaattgtatcatctcaggcgtgtctgcgatgatggctaggtgtcaccattaccatcaatgccaccatcccagttgggcaattaacgacggccagtgttacgctatcgcctctttaattaactccaattgcactcttttcttcaacttcgagttgcgtcaatgtgacaattggaggcacttttgcttttcgcccgccgttttcttgctttcgttattattttctttcgaattaatcaaggtgtcgttgtctggctttcgtttcgtttcggtctcggtaatcacaacagactccaactgctccattcaattaaacaagacgccgcttgtgtttattaaatcatattctatcaatttagcagcaactacagggggtattcacgtgggtgggacgacggcaacagatagcagaggaatagcagatgatattaccttcaagaacttattagtgaatacacttttaaatcttttatgatttatcaagttactaattagtaaaagaacctaaggggtgttgatattttgtatatatgtaaggtacttgattcaaaactaaatgtaactgttcctaaatacccactttaaatgttactagtaagtaagaatttcattttatattattagattccaattcgttttcctgtgtatatttttcgagcacctgctgtttttttgtgtggggcaacatcatccgttcctgcctcaacccacagcctccccttcggatttagcctaatttgtattgattgttttcgtaccaatgaatcgtgcaacttcacactccgaggttttcgggggtgttcgtgtgaatgtacatctttctgccccattgcatgtggtcggagcttctaatgttgttgttgttgttgttgtagcagggccatatgctatatgctatatgctctatgctatatatacatgcgattttctttatcgtttttttcgtgcacagttcaacaaataacggggtcagctggccattgttattggtgttgccgtttatgcctgccgcaatttgcatcgtaaatttgtctatgcatgtacttcgccgggcactttgttaacaattgcggttaagataatagcaatcatttatgtttacaacaaatcccacattttttcccattctaaatatgtgaacatgcgggtttagaaagattttccaaatagcttctaagtgcaaatataaataaacacttgtatatatttcttttgccaaaagagttaatacttaacccattactgtatcaaatgcaactgagttgcgattactagattgaacagtggttttcgctattagcagccaactgcctcgcactgcagctccattgtgaatggagttcttgtgccctcgatgtgggctaatgccaaagggtttgctactgcgatccaaactgcgacgcgtctgcagttggaagagcgttgagttcttgaactttgcggtaacggttaaaatacgcttaaaatgcaccgtgcgtcttcatagggcgggtttcatcattatagccacatctattgtggccgattcgaagcgaaaagtgttcaaagacaatgtcttgcatacacaatcgcgcttgtttatttcgaccgacgtcgaatgttgaatggcctggatcgtatggatcgaatggatgttttctgtttcgaaaccaaacatgcacctgtgcacatggcctgcgcaaacacaggtatgtaaaattgtaaatcaataaaagacacgactggcaagcggctgtggaagttgtgtttagagcagctatttagcgtctgtggtatttcatacagcaactatagtaattatatatctgtatttaacccttccttgacgactattctcacttccaatgggggtctttcccatccatttcaaatggttcatgaaatgggcatggtattcccgaaataaacccgccacattttgacatttcgaaattggagcaagccaagacgacgggaagcgggaaaagaagcgttgcgtgggtcgcatctcagattatttttagttgctgcaggaagccagaaacagcagcacagcattgagttctccttatcgccgcagaagtaaatcaaacaaacaaactggacaatgtacaaatacagtgactaattgcagcaagtcggggtcaccacaatggctggacgatgagtggtgatgatgcgccactggctcgcacataatttgatatttcctcaattgagtgtacaacactcgacaataatgcagtagttgccactctacgtatgctgacacactcgtggccaatctaatagcactgcaatgtggtgtgataaaatactactgagctttgtcaataatgcttgtttaaatgtttttaattagcttttatggaagaatagaagaaatcctttcttgacattatatattatatcctagaaaatcttttatttctttatttagctattagttttaactctatgctagtttagtgcccaaacttgtgccgcaaccgcacaaaatcgcataaaatgcaatcacaatacgcacaatgaagcgtcgatggacgcgaggcgggggtcccactgtgtcattggctctcctttgtcagctagtttactgtacgtcaatttggtttttcttttttttttttattattgcgttttctttggcgtgttttgtggacatgccagactgcccgtcgccagctggatgcaattccacaactacacttcgctactcgtgatttttggccaaatgcgaaaaggtcgggcacatgtgcgcggaaataattacgagtggaggctgcagccggaaatgtgaatgggtgtgcgataatgcagcactatcgattgccacagggaaacccgctttccatcgccgcagattaccgaacccacagagcaggcatgcaaacagcatttgcaaacaaccgaattggtgtcaatgaacctaggcgaatgcaaatatgcatttggacgaggagaaagctctctaagaacgcacaagtcctggactgcaaagcaaccctcgcaataaataattcgcatgtacacaagtgcaggaggggcagtccagtcaaggggttatgcccgagtgataatgggcgttgtggtggcaatggcaacttaattaaaggttcacctccacaaaagtccccacagaaacggattccaaccccattgtaaagtgcgtacgagtacgttgcttttgtccatgaactcgaaatgcaaactgtaaccagagcgacgatagccaacggtacgagtgccattggcattaatagcacccccaacggaaaactgaggggaagcacaaagcgccttacgcccacagtggtcactgcctaattgaaagcttttgccatatttgccatctctgggagaaaaaggttctatctatttagcaaagttgtggtggtgcattcatagactgcttgtattaaataggcttttactcattgttacgtcaaaatcaaaataatgctgatagatagatagatggtgtaggacattttagtgtttctcattgatgtcaatatatggagaaatttaaaagcaaagatattaataaaaacattgcaaagtactgactaatacattttatatgcgcactgtatttgttaaatgagtaacgcgtttttattcgaaaatatagcatgcgcaatcgaaatactaccaaatgagtaaacactgtatctgataaaaacctttatgcagaactgaatcaattgtaactacaatgtaaaacgtaagtgattctttggtggttgtttttccagtttgccatggatttttgcctatcaactttgcaaacaggcgatgtagctacatttaaatctcaataaatgcaaagaactacccgctttgattaaatttgacagactcgcgacgccataagctgctataatcgatataattctgctgtttatcgcctcccggaagttagagccgttgtatatctctgaatttcagcagacatccgtgcggaaaatggcgtattgcgaggaaaaacaacaaggaaactacaagaaactacaaagatatcgtaatacattgcgtgagcgataataggttaggccacaaactgtatacatatgtgtatataacacagtataaatctagtaaatatagtatacccttgaaagccctgcttggtcagtagactatctggaccttatctttttgggaagtttgagagaggcagcactggcttcctctgaaactctgacgtcttaaaacgaatttgtttacatttgcatttactttgattatcggacggcatgttcgcagaaatccgctcgctcggctgaatcagtggcgaattgtttatacaaattgctttgtaaaacgaatttattgcgtgactcaggcggcgttttgctttcgattctcgaatatatctcatgttttaattaaatccgatcgggtttgagcgctttaaacttgccagtttagcacatcactttaagttgccggacgatccaacgtgactggaaatgccaaatggcccggcacaaaggcgctacttcagccggttttgcgctttttcggttttgttattattatttctttaaagttccgaccgcaaaaataaaccaagaagatcaagccacccggggtaaatgtctgctgacatttggtcggcttgaaaaaagtactaaagtctacggagataattgaataaagtacgtgagtaagtctacgagtgaatcctcatgtaaaatttgtttgcgtcttgtaacgttgtcatgttcgtcgagactaaaatacaatgtattaaaacttttttaagaacttgctgttatgacattgtatgatattctattctatatgtcgcatcagctttggaaatcctttaaatatggatttttttacaaatatcgtgaaaatgccgtattcaattcttgaataaatgaaagctgtccatcgcatcggcaaattgaacaaatacattttaagattctagttgataacttctgcttgcgagtatgcgtacttttgtatttcctccattggtgacccaaaattgacaattgtataatcaaagcacaactgttttctggccaaatcgaatcttataatccatatatgtacgtacagatgtacgtaacccaccacattagctaatcgcagaccaaaagtctcttgtctgtctgccatttgtggcacatgcacccagtatttcccagactgcctggagtttttctttctggtttttatcttttttgctgcctgtgcattgctttacaattgcagaacacgttcgcattgccgtaatgcaggctttttacgtttggacaatttttcagagctcaaaactttggcctacatgcataggaactgatttttggggaggagccaataagaaggcttaagaaaactttaactaactgcctatttagctggccagtgatacagacaagcgaaatcagttactatcttaagcgtgctaattataatgaattctcattataattttttaattgcctagtgattcagcctcaccttagctgagtaaagaactgaatcgcttaggagaggtgacaggtgcttggcgattctccgctaatcagctcggatgaaaccgagatatcttatcagcctagacaaccctacgtgccaactacttgaatttaaataacaattctagagatttaatctaacaaggcattgcgcaatacagctgcggttgattgagcgaaacccaagatgggctatcactaaaacgatccaccacaagactaggaaactgggaaaggagagcctcggaacacatttcgttcgcaaggtggcccatctgacgacagttggctttgtcgggtggtaatgcaaaaccgtaaacaaatacaagggaacctcgataaccgctatgggtgctattaagtcttaaggtcgagcattagaaccttagagataaataaagaatgtttcaatgaattacgagtattaacgtgggataagctttttccttgccactataatcgaatgatgactttgaacggaattaccgatatttaagattggcttttgctaacagaaattgcacttaggggagctcgactgtggtgtgataattgaatccgcctgaaagtgttggggcagaaaaccacttttgactcatgatccgcgcgacgggagcacgacttgggaataagccagtgactgtgacaaaacttctccgcaagtacttgtgagtcatgccccattgcccaggggggcaggggaggggtgggttggctgcaggaggggctgcagtaaatgcaatttaaatgatcattaggcgcatgagttttatgttgccatttaatgagacgcaaatgcggtgagatgcctgggaaagtggccgttgcaggtgaaaggagtgtaaaggttggcgcaaattgaaagccctaaaatagttttgcaaactgatttctgtttttgaattatcttgtgtaatagatatacatttacaaacgtttgtaatgtatacaagtgtgtctagtacactgtatttatttaataatctagagatgatcgttacttatcataaactattattattgcaacggattttgctcaggtgttttcaaaaacaataaacaaaatgttggcttccttttcgccatattaatataatttatattgcgccttaaagtggctctggacaaaagtaaatattgctcggcggccttcacttacgtattgaaggtcttctggtagtccttgatctggttacgggagaactcggggaagtcggtgtagacgttgaccactttgtaggtgcgacgcacctcgatgcccgcctcctgggactccatgatctcctggcgccgattgaggatgtgcgtcagctcggagctgtccgtgttggtggtgctgctggggctgtccacgctgtccttgttggaggcggatgaggcgttcgaggaaacggacattgtgtcgctccttgttgactcgctttttagtgtgctggaatttccctttctgcccttttctgctgccttctcactctctcttccttttggcacacccacgcaaaaaggaccgtaaaagagatgtccggatacacacacaaatgcggcgatgcgccaggaaaacacacacggactcgttgcacgtaagcttttgtcgtggggagtggccctgagtccttttttggctttgaaaaaacagttgcaaggtgcgtttgaattgccggtctttttttttttttttgctgcaaattggctttcttattggacaactggtgttccgcttcgaccgccgcgactaccgaatcttctgaacgctgagagacgaatgaaagtgcgaccgtgacacgagcgttcaaatataccagcgggcgcggcggcatttttcgagtgaccgtgtgctgacaaataccaaagtcagctgaatttcgaggcaatatatataccttacaatttttttaattcattctgttactaataatgtatataatcattatttaaagctagctgatgaacagacggtttcaaattttacgaaagtttttaactttcttaagcaaaatatgtaaccgaatatttattgtatgtttatatagttataatataattatataattagtttgatcacaaaatcaatctttgtataattttaatgttgttcccaataaaatatttaaatttaagattcttaaatatattacggcatatgaggtatacagacaaccctaaactatcgtccaaagctcccagccctaggtgtgcccgcattttgatagcaatttagcaaaattttgtagaaaattgtaccgactgtgattgtaattcgtaattgttcaataaaaatgggcagtaaactgtttaacaaactcttgctaattgccggatttgccagcctggcacatgctgctttttctgctgcccatcgtaagttttcgtcactgttgtggtaaataaactttggaccactaagtgccgcatttactccacagatcgcacctatttgaggctgacggagcaggaatggaatagccttccattggacgtaggtttcggtgcatttagggtgcttgcatggttactcacgaaaagttttcctttatcaatccttagattatcctgcagaccgtcatcagtttggtgattgtgatttacaacatcatcgagatcgttggcaacttcaaggaaattcgcgccaccgtggacatgcaacagaaaacttgggacaccttgggcaacttcccctcgttctattccttcaatcaccgtggtcgtgccttaaatcctggatatacgcccccggaataagagac

SEQ ID NO: 42740 - DNA, 1000 bp, DROSOPHILA
aagattcggtagtcgcggcggtcgaagcggaacaccagttgtccaataagaaagccaatttgcagcaaaaaaaaaaaaaaagaccggcaattcaaacgcaccttgcaactgttttttcaaagccaaaaaaggactcagggccactccccacgacaaaagcttacgtgcaacgagtccgtgtgtgttttcctggcgcatcgccgcatttgtgtgtgtatccggacatctcttttacggtcctttttgcgtgggtgtgccaaaaggaagagagagtgagaaggcagcagaaaagggcagaaagggaaattccagcacactaaaaagcgagtcaacaaggagcgacacaatgtccgtttcctcgaacgcctcatccgcctccaacaaggacagcgtggacagccccagcagcaccaccaacacggacagctccgagctgacgcacatcctcaatcggcgccaggagatcatggagtcccaggaggcgggcatcgaggtgcgtcgcacctacaaagtggtcaacgtctacaccgacttccccgagttctcccgtaaccagatcaaggactaccagaagaccttcaatacatacgatacggctcgtgatggcttcttggacctgcaggagctgaagttcatgatggagaagctgggcgctccgcaaacccatctgggactcaagcagatgattgccgaggtggacgaggataacgatggcaagatttcattccgagagttcttgctgatcttcaggaaggcccaggccggggaactggactccgattctgggctgaatcagctggcccgcctcacggaggtcgatgtggagcaggtgggagtgagcggagccaagaacttcttcgaggcgaaaattgagcaacagctgcggacgaacaagttccacgacgagattcgggcggagcaggaggagcgccggcgagaggaggaggagcgggcccagcggcgtcagcagttccagcagcgggcagcgatcttccagtag

SEQ ID NO: 42741 - protein, 217 aa, DROSOPHILA
MSVSSNASSASNKDSVDSPSSTTNTDSSELTHILNRRQEIMESQEAGIEVRRTYKVVNVYTDFPEFSRNQIKDYQKTFNTYDTARDGFLDLQELKFMMEKLGAPQTHLGLKQMIAEVDEDNDGKISFREFLLIFRKAQAGELDSDSGLNQLARLTEVDVEQVGVSGAKNFFEAKIEQQLRTNKFHDEIRAEQEERRREEEERAQRRQQFQQRAAIFQ

SEQ ID NO: 42742 - DNA, 3439 bp, DROSOPHILA
aaaattgaatatatctagaaattaaatacgttttgtttaagaatgtgtctgctttccaataatattattctacttactatactgtcagtcctcgaagtccagggactttaccagcagcaaacaagtacagtgttacccaccgtaaagtccactatgagctcagaccataccaccggaatggaggaaagttcgtcacctgtcgaggaaacaacaacgctttctccgcctataagatgcctcagttgtaaattttgctcacccaatgaggggaaaaccagaactaggaagggcaaaaagatgtgccacataaagttaggcgaattgaacggttgcgtatctatgtacttcaacttcaacagcagtgctggaggaccagatggctttatggtgagaagctgcatttccgacatggacgagagttcactggaacactgcgagaaacatgcagaactctgtgagaggtgtttcgaagacgattgcaactatgtggaaatagataaaaatggtttggccacgaatgcaggatcgcgaataatatactcaagtctaatgatcttctgtttagccggctggctctttaggagtgaaaaatgcaaacttatgattatattataggcctgttcagcttaataatggcaaattgaaaaccaaaattatggaattcggcgaaatcaccatcgtcatgtaatggaaaatgtaatttgagttacctaagaatgctacaaatactttctgagacatttccaactggctcttctagtgcacccaaacaaatttcttcgaactattgttaatataaactctcattttgattgatgcaataaatatacacacatatatgtacaaagtatattattaatggtactgcggttgataaggcgttgtgattatttctttatttgataaggcctagcaggttgaaaactcttttaccactagccatcaatgaaaacagggttttccaaggacataattactaaactactgtgaaagagtaattgttttattaaaatgatttatttgggattatggaagtgttcttaaaatgcttcagctcctataattaggttatgtctttttgtctgttgctttgtaatagttaacattactcatagacccaggcacccggtaatttgattggatcatccaactacgtggaggtggttggattacagggcactgcgtagagcgatcaccactcccgtcagaaggccgaccacgcccacattcctgagtgcgcctgctccattgaagggtaccttgttgcacttgctctccgtacacaattcgcactgatgggcctccactttggcattgcactggtactgcatcaggtggctggcagcggtaaaacatcctcgcactccaagttcatctgggggaaaatgttgaaaggcaattgttaggatttttgctggcataataataatgcaatttgggaatacccttttacattataaaataaaatctttgaaaactatagcattgattcgctgtgcttagacttggtaccaacttactccagactccgctgtagcacgttccattggggcagttgatcaaagggagcgtgtccggatatttggccgaccagcagccggaaacctcattcgaaatgcatgtaatgcactggaactcgccggcagccacattgcagccattttcggagcaggaagtgcaggcattggttgtagagcagccagcctccaaggtgtttaggcaccctcgggtaacattggttcctgaggtcatggtataacacccgacttcctggttgtacttggcctgtccgcaggacttcgcattggtagcaacctgttgctccgcacagttctcgcaaatgatacaggaaccggcctctcgttcgtaggtcggactattgcaaaagtcggagttgcagacgaggcaactgggatcagtgctgtccgacgcacacttgatttccgtggtggccgatgtgcaaccacgggtcatgttgctcgcagacgttccggtggtgaagcacccggcatcgatttgactacatcccgcgaccaaggtatttgagaccgcattgcagttctctcctgagcaattatagcactggcgacgattggcggggaatagtcccacattgcacagggatgccgagcatgaggagcacgtggattccgttccagcagcacaggggtcaccacattgacgggtcaccgtcttgttgtcattcaactgattcacgcagacctgtccattattggggcacactgcattgtattgcgtatccgtcacgttggtcgtggcgcaattcgcttcgccgaggcactgctggcacaccaaattcaaattgcaattgtcttccttgcaggtcgagcaggatggtaaggtgcacgcagtgccattaatcaagcagccacgagttagagttcctattgggatacagaaaatcaataactagatgcaagggaatatggttcagagcaaaacttcgtatgatttctaatataaacttataatgatttctaatataacttatatattccttataagttgagagcctgcagattctagtggcgcctaagctgtgctaatttcattcagatcattttcacgcccactctaaagcccacaaagcgtgccagattctactgatacttcaacagaatgtttaaatgtgtaccttaaactcccacaagctgaataaagaggtatctgatggtcgagtgactccactttagcgttctcttcgttattaaatcaaattatacgcaatatttaaatcttagacaacaacacgaaaaagccaggtagtgcagtaactgccaaatgagtcacaacatcataaacctttttcgatccgcacgaaattagaaaagaaaacaaggatcaatagctatcaaaaagaaaaagagataatcgcttatcacctttggttgcactgatcgataagagggccactacccccgtctaagaatatgaaatagtcggtcatgagtcatacaaacccacctgcgttaataagagtatagcattcattatcacactctatagaagtttgagtagatggactcgttaaacaatttccagtgtcattcgtcgtcgatgtgcacgaatagcactctgcaatggcaataataatttgaagtaagtcatttgaaaaaactcatccaaaatgtggtaacctacggagggctgaggtgctgtccagctggctggcaatgaaagctgctatcacaatcatacacaggctgtattctctcatggctctcggttttctattctttctggcttctcaactgaaatgtcggaccggctggatcgaccaccgttttttaactggctccctcactgtttggccatattttttttacccccattcgcataatcaatttcacctgaactcactaacacctgccaagctcttctccgcatgcagtggttattctgctctacacacatatat

SEQ ID NO: 42743 - DNA, 1508 bp, DROSOPHILA
gtcgatccagccggtccgacatttcagttgagaagccagaaagaatagaaaaccgagagccatgagagaatacagcctgtgtatgattgtgatagcagctttcattgccagccagctggacagcacctcagccctccagtgctattcgtgcacatcgacgacgaatgacactggaaattgtttaacgagtccatctactcaaacttctatagagtgtgataatgaatgctatactcttattaacgcaggaactctaactcgtggctgcttgattaatggcactgcgtgcaccttaccatcctgctcgacctgcaaggaagacaattgcaatttgaatttggtgtgccagcagtgcctcggcgaagcgaattgcgccacgaccaacgtgacggatacgcaatacaatgcagtgtgccccaataatggacaggtctgcgtgaatcagttgaatgacaacaagacggtgacccgtcaatgtggtgacccctgtgctgctggaacggaatccacgtgctcctcatgctcggcatccctgtgcaatgtgggactattccccgccaatcgtcgccagtgctataattgctcaggagagaactgcaatgcggtctcaaataccttggtcgcgggatgtagtcaaatcgatgccgggtgcttcaccaccggaacgtctgcgagcaacatgacccgtggttgcacatcggccaccacggaaatcaagtgtgcgtcggacagcactgatcccagttgcctcgtctgcaactccgacttttgcaatagtccgacctacgaacgagaggccggttcctgtatcatttgcgagaactgtgcggagcaacaggttgctaccaatgcgaagtcctgcggacaggccaagtacaaccaggaagtcgggtgttataccatgacctcaggaaccaatgttacccgagggtgcctaaacaccttggaggctggctgctctacaaccaatgcctgcacttcctgctccgaaaatggctgcaatgtggctgccggcgagttccagtgcattacatgcatttcgaatgaggtttccggctgctggtcggccaaatatccggacacgctccctttgatcaactgccccaatggaacgtgctacagcggagtctggaatgaacttggagtgcgaggatgttttaccgctgccagccacctgatgcagtaccagtgcaatgccaaagtggaggcccatcagtgcgaattgtgtacggagagcaagtgcaacaaggtacccttcaatggagcaggcgcactcaggaatgtgggcgtggtcggccttctgacgggagtggtgatcgctctacgcagtgccctgtaatccaaccacctccacgtagttggatgatccaatcaaattaccgggtgcctgggtctatgagtaatgttaactattacaaagcaacagacaaaaagacataacctaattataggagctgaagcattttaagaacacttccataatcccaaataaatcattttaataaaac

SEQ ID NO: 42744 - protein, 418 aa, DROSOPHILA
MIVIAAFIASQLDSTSALQCYSCTSTTNDTGNCLTSPSTQTSIECDNECYTLINAGTLTRGCLINGTACTLPSCSTCKEDNCNLNLVCQQCLGEANCATTNVTDTQYNAVCPNNGQVCVNQLNDNKTVTRQCGDPCAAGTESTCSSCSASLCNVGLFPANRRQCYNCSGENCNAVSNTLVAGCSQIDAGCFTTGTSASNMTRGCTSATTEIKCASDSTDPSCLVCNSDFCNSPTYEREAGSCIICENCAEQQVATNAKSCGQAKYNQEVGCYTMTSGTNVTRGCLNTLEAGCSTTNACTSCSENGCNVAAGEFQCITCISNEVSGCWSAKYPDTLPLINCPNGTCYSGVWNELGVRGCFTAASHLMQYQCNAKVEAHQCELCTESKCNKVPFNGAGALRNVGVVGLLTGVVIALRSAL

SEQ ID NO: 42745 - DNA, 3203 bp, DROSOPHILA
ccgtggacccgctatggtgcccacccacttgaagatgttctcgccgtccggaaacgctgagatgcccctctcgttggccatcatcaggttcatcagttccttgtgcagtctgtgggtgagtgtgagtgtgtgtgtatattggcggattatctaggctgcaccatgtgctactcaccttttgctcacggcgtgattgtctttcacgggcatggagtcatcgctgtgcttgctgccgccgccgcctgctccaccactttgctcggggctgatattctgcgccatgactatatatctacgtctatatatgtaggatgctagtgctatccgctgtttggctttcagtatgtgcgtgtaatttagcgcgcttcgtggcggtcgggttttcgattctcaattgtgattatatgtactgtatagtggaaatttagtttgatcggtcggaatacgcgtctgttgctttttcagatattttttttttcacttttgtgtgaaaacaaaatggaaggagaacgagaagaaactgtgtttgggcacagggttgtatttcatttatttttggggggagtcgatacgctctcttggcgtggtcgaacggtcacactggccgagagataacggaaaatgtttcaaaggtaagtaaagattataaacgtattaagcttaatactataattagcttactattccaagtatgtataattattacacgtttaaaaggcataacgttaagtgtaaccaaattatatcaatggattttgaataccaatattatttattttatattttgagcttaatatattaaatcacatatatttaagcctctttatatatgtaaatattttaattttattaaaataaattatatattgttttgtaatatgatcgagggctgccaccttgtgataaatgcttaccaacacttttaggtacgccgtttagtgtacgtaagttgcgtacctagatatccagcgaaatcaaaacattgagtaaatcgtggaaaatggatgaaaatagcttaatctacggactcgaactgcaggcgcgggctttaacacctcagtacggagagagcaacgatgtgtgcttcttcatagccaccaactccttgaagcccaccaatcaggttcacttaatccagtacgaggaggagcagggatccgtgcaatcaaaggtgaatatctgggatgatcaaagtatgagctaaacatacaactttgaacaggtctttgagcacgccctgggtgaagtttggaaactaaatagttgtccgcgtaatcctcgcctgctggcctccgtctacaatgtacaaaagggagcacaagtgctgaccaaagcggctctgtttacgctgcccgagaatctcaatcccgatccggagcagctgaagtcagagtacctgccgtgggagcaggttgaggtcctggataccgaagcactgggcgaacgtgtgaagaccatcgaattccatcccaaccaggacacactcgcctgtgtggtggacaacaaggtggctgtgatgcagcgggccgagtcctctactcgcgtggtggccgaggtgccggccagtggttcatccagtggatctgcaaagcacacacagcatttcaccagcggcaagtggtcgcatcatcatcagggccaccagtttctcaccctccaggatggcaatctaagtgcctacgatgtgcgggatacacagcattgtgcctggagcatcaacgatgcgcatggtcaaatggtccgtgacctggactgcaatcccaacaagcagtgccatttggtcaccggcggtgacgatggctacttgaggatctgggactgtcgcatgcccaaggctcccgttttcgagcgctccgatcattcgcattgggtctggtgcgttcgcttcaacacattccacgaccaactgatcctctccagctccagtgactgcaaggtgctgctcacgtgtgcgggatcggttagttcggagacgcaggttcaggctggactagatgagtccaacttcagtggtgccgatgccgaggagaggcacaaactcttgccagatggtctgctgcagaccttcgatcagcacgaggactccgtttactgcgcggagtggagcaatgtggatccgtggatctttgcttcgctcagctacgatggtcgcgtcataatctcaaaggtgcccaagcagtacaagtaccagattatattttaagccattagtttcttaaattattacgcatatttcatttaaatctaactaaacgaattgtgtccttgtatgtagtagcaggttatacaaatattaaaccaataagttattatatgaagataaatatatcgagggactaaagctaattaggcttaacctgtatcctcggatgtgcagtcggaggaatcattgggattggcagtttccacggaacaaactcgcttgatcagctcgttttcgatctccacagtgccattgtccactgcctcctccatctgcacgtactctatggtggcggcacttttcttggtggataggacaggttttgcggcagcaggagcaggtgtttctgcagtctttttagcctgggcttccgtatcatcctcggcttcctcagccaaactgctacgctgcggctgaacttcggcgtaaatggcgggaaactgcgactgtagcttctgcttgatgatccgtatcttgcggaatatgtaatccagatccttcttcatttcgctcaggcatttcacgtgtcttttgaaatcctcgctggcacttttcaaacgactctgcgataaggcattgcagttgagcagcatctcgttggttttctcaaagcgttgcagcctgtgggatatattttggatgtttattataatctctggttaaatgaaatggcttacatttgcttttgagcccgtatcatggtctccacatcgccctgattcaccattcctgcgagactttgaatgaaggcctcggcggcggagttgccgaagccagtgaaggattccaggtcaggagtggcatcctcggactggtgcacatccgcaaggcccaagtggctcattgtagcctagaatttatttgtttataataagggagaacacaaaaattgatttgtttacttgcttttcaaggtctcaaggtttctttgcgacaacttgaactctgctttgtgtgcgtttgctggcagttttagttttttctatttttatttacgttt

SEQ ID NO: 42746 - DNA, 1152 bp, DROSOPHILA
atggatgaaaatagcttaatctacggactcgaactgcaggcgcgggctttaacacctcagtacggagagagcaacgatgtgtgcttcttcatagccaccaactccttgaagcccaccaatcaggttcacttaatccagtacgaggaggagcagggatccgtgcaatcaaaggtctttgagcacgccctgggtgaagtttggaaactaaatagttgtccgcgtaatcctcgcctgctggcctccgtctacaatgtacaaaagggagcacaagtgctgaccaaagcggctctgtttacgctgcccgagaatctcaatcccgatccggagcagctgaagtcagagtacctgccgtgggagcaggttgaggtcctggataccgaagcactgggcgaacgtgtgaagaccatcgaattccatcccaaccaggacacactcgcctgtgtggtggacaacaaggtggctgtgatgcagcgggccgagtcctctactcgcgtggtggccgaggtgccggccagtggttcatccagtggatctgcaaagcacacacagcatttcaccagcggcaagtggtcgcatcatcatcagggccaccagtttctcaccctccaggatggcaatctaagtgcctacgatgtgcgggatacacagcattgtgcctggagcatcaacgatgcgcatggtcaaatggtccgtgacctggactgcaatcccaacaagcagtgccatttggtcaccggcggtgacgatggctacttgaggatctgggactgtcgcatgcccaaggctcccgttttcgagcgctccgatcattcgcattgggtctggtgcgttcgcttcaacacattccacgaccaactgatcctctccagctccagtgactgcaaggtgctgctcacgtgtgcgggatcggttagttcggagacgcaggttcaggctggactagatgagtccaacttcagtggtgccgatgccgaggagaggcacaaactcttgccagatggtctgctgcagaccttcgatcagcacgaggactccgtttactgcgcggagtggagcaatgtggatccgtggatctttgcttcgctcagctacgatggtcgcgtcataatctcaaaggtgcccaagcagtacaagtaccagattatattttaa

SEQ ID NO: 42747 - protein, 383 aa, DROSOPHILA
MDENSLIYGLELQARALTPQYGESNDVCFFIATNSLKPTNQVHLIQYEEEQGSVQSKVFEHALGEVWKLNSCPRNPRLLASVYNVQKGAQVLTKAALFTLPENLNPDPEQLKSEYLPWEQVEVLDTEALGERVKTIEFHPNQDTLACVVDNKVAVMQRAESSTRVVAEVPASGSSSGSAKHTQHFTSGKWSHHHQGHQFLTLQDGNLSAYDVRDTQHCAWSINDAHGQMVRDLDCNPNKQCHLVTGGDDGYLRIWDCRMPKAPVFERSDHSHWVWCVRFNTFHDQLILSSSSDCKVLLTCAGSVSSETQVQAGLDESNFSGADAEERHKLLPDGLLQTFDQHEDSVYCAEWSNVDPWIFASLSYDGRVIISKVPKQYKYQIIF

SEQ ID NO: 42748 - DNA, 2845 bp, DROSOPHILA
taccacccactaccacccactacctagccacctggtgggggtggtggaaaactcctgggcagaagctggtattaaaattcagattggttgcgtcacagttttgacggtttagccggacgggttaacccggcattagtatgcgagcgaatattaaaacccaacttgaagattaccatattttatgctgatgcatacatatataccagccagcactagtggctagtcttattttagtaaccactagccgagcatcaaataaggattattgcctttcggaattcgtaaaagtaaagcggattgaaaactgaaatcattgctgtggaaatgtgcatcggggtaggacttttatttcgtgaaattgattgaatttcgttttcactttgcacccaatccgaactgcaaaatggcaggctgaaattgcaatgaactaaggaaatttcaggcttttcagacttttctctctctcttgataagtttcagtcttctggtagaaattccactcctttcatgcgaaacacgcctaagctcctgaaaaggggagggggaaacgtacttgttgtcctgttttgttacttctgtgcggttgttttcatttcatttacagttgcacttgaagtggctgaatggggcatgcatgatagtcctggttccttgatttcccccggtgccaaagaaacccactttccagaaacctcaaccgtacgagagcttgcatttcatacacttttactgaccacttgccaccacgaaagccacacatcccaaagatgtcacacatcaaaaccagagaagcagaaaatgtatattagtgttgcgcatatgaatcgcactgttccacttacagagcaatcaaaatcgcggatactaaggacatatttaatatattacagtcagatatgcatttcaccctttactcactgttgtgcatctcatttggatcggaatgaattgaaattttatttagggtcaaaacttttcaataacttgtttattcccgatcctagtccttaactattgtattgaaatttaaatctgggttgtctggtagcgttggcaacacatcgtttggatcgtacgttggaagtgtgaacacggtggtctcgaattcataatcgttttccatattctcttcttgaccatcgttataatcattttcaggttcgacgaaaagtgagccaccattgcaggtcttcacgagctcatctttgtggcaaagattcttgtattgcttattgcttcccttcatgcactctgaagcggcttcttcgtcggtgtcctcgtagacgggattatcctcctcctcacagagactcactccgcagttgtagacgcactttagcaactggtggaccagtgctggccgaacatactcaactatggcgcagcccacgcgattagctcgatccctcaatacctgaaagtagtttttggacagttccctggaaacggtcttcaataatattttggacttcctggtacatggacttactgctgatttttagtccatgagaagaacagcttctgcacttcatctttactattggggtcaaaccagtgatcgagttgcttcctcagggcctcctttttcgtggtcatgcagaagtacttttccagcgaatagctgacttccgcatgaccgtaatttggggttatggcgcactgatctcggattggctcacaacgacgtaccagaccgtcggccactttggccagttccggatcccattcgatcgtggtcatccttgccgccttcggattctgatccattccgccggcgaacttgttgcgatattcattgtgcttgtccacgatgagggctatcatatcccagctcattttcaccatggctgcggcttgtttgggacaagtggattcaaaattctgtaagaatatgtaaagcgatccgaatgatttggtctcccgtttactacccactcactccattgtcatcgcagagcacgtgttgtcctcggcacaggtcagctttgcaccatttatctgaagcgcctgtatcttgaatatataatgtggagaacagcagccagatgcactttatcatggcataaataaccagagttgtgtatgctctgacagaggttttgaaataaataaatcgaagccttgacgagcatataatgaatcgttaattctacgcttgatccgcgactaattgggttgctaacatcacttattgaaaggcgttccttcatttattgtattccaagtgtctttagggcatggtacgtatcactgagacagcattggccattcagttcttaagatttaaagatctttcactctccagaagtcccttctatcaattatatgggtttttgcattgaaatgcaaggcactttgcattgctcataaagaaatggcataggcaattgattcaggaagcgacttaagcttaagtggctgtctgattgcagcatttagtcgctgaatgaggaaattaacgggggaaaactcgtttccgtacttctgcttttgtactccacttaattgtctcgtgaacttttgcagcccaacgttcttcgttcaaccgatgggcagtaaaatcccctgtttagttgccgtgaaataataaatccaataatacacacattagctgcaccacatttgccgcttaacaggggttaagctaaaaaaaaaaaaggaagtcaggttccccagtttttttccccctgctttgtctatctggctgcaactcgttaagccactcaactaaaagactaatccacttattggcggtttggaccgaagtaagtacaaaatacacagcactagagttgtagaagttcgattttaagactcgcctaagaagttgctggaaaaattcaga

SEQ ID NO: 42749 - DNA, 795 bp, DROSOPHILA
atggtgaaaatgagctgggatatgatagccctcatcgtggacaagcacaatgaatatcgcaacaagttcgccggcggaatggatcagaatccgaaggcggcaaggatgaccacgatcgaatgggatccggaactggccaaagtggccgacggtctggtacgtcgttgtgagccaatccgagatcagtgcgccataaccccaaattacggtcatgcggaagtcagctattcgctggaaaagtacttctgcatgaccacgaaaaaggaggccctgaggaagcaactcgatcactggtttgaccccaatagtaaagatgaagtgcagaagctgttcttctcatggactaaaaatcagcaggaactgtccaaaaactactttcaggtattgagggatcgagctaatcgcgtgggctgcgccatagttgagtatgttcggccagcactggtccaccagttgctaaagtgcgtctacaactgcggagtgagtctctgtgaggaggaggataatcccgtctacgaggacaccgacgaagaagccgcttcagagtgcatgaagggaagcaataagcaatacaagaatctttgccacaaagatgagctcgtgaagacctgcaatggtggctcacttttcgtcgaacctgaaaatgattataacgatggtcaagaagagaatatggaaaacgattatgaattcgagaccaccgtgttcacacttccaacgtacgatccaaacgatgtgttgccaacgctaccagacaacccagatttaaatttcaatacaatagttaaggactag

SEQ ID NO: 42750 - protein, 264 aa, DROSOPHILA
MVKMSWDMIALIVDKHNEYRNKFAGGMDQNPKAARMTTIEWDPELAKVADGLVRRCEPIRDQCAITPNYGHAEVSYSLEKYFCMTTKKEALRKQLDHWFDPNSKDEVQKLFFSWTKNQQELSKNYFQVLRDRANRVGCAIVEYVRPALVHQLLKCVYNCGVSLCEEEDNPVYEDTDEEAASECMKGSNKQYKNLCHKDELVKTCNGGSLFVEPENDYNDGQEENMENDYEFETTVFTLPTYDPNDVLPTLPDNPDLNFNTIVKD

SEQ ID NO: 42751 - DNA, 2873 bp, DROSOPHILA
tgctgaagggactgagcttcacgattcagcccatggagaaagtgggcatcgtaggacgcacaggtgcgggaaagtcgtcccttatcaatgcacttttcagactatcctacaacgatggagcaatactcatcgacagtctggacacaaatgatatcggtctgcacgatttacgtagcaagatatccattattccacaggaacccgttctgttctccggcacaatgcgatacaacttggatcccttcgagcaatatcccgatgataagctttggaaggccctcgaggacgtccacctcaaggaggaaatttcggagttgccttcgggtctgcagagcatcatatctgagggcgggaccaactttagcgtaggccaacgccagttagtctgcttggcaagggccattctgcgcgagaatagaatcctagttatggacgaggcaacggcaaatgtggatcctcagacggacgccctgattcaggccaccattcgaaacaaattcaaggactgcacagtactcacgatagctcatcgtctaaacaccattatggactccgacaaagttttggtgatggatgctggtcacgtcgtcgagttcggttctccatatgagctgttgaccgcgtcaaaggctaaagtgttccatggaatggttatgcagacgggaaaggccagctttgatcatctactgaaagttgcagagaatgtaagtactaaagtcgaaaatttcattaataaactaacttttccttctattttagaccaaacaaaaccatatttgaagctaacatttttatcatattaatgtgtttgtctacgtaatgtatattgggcccaattgtaatggaaagggaatttcgtggtcatagattcagttttatagaatacaaaacgtttgtacttaagggagtaaagcaaaatgacaatgttttcttttaaataaaatgctacttaaacaacaagaatcacgtgccaaatcttttgatgataatcccaacattgctttcactgaatttaccaaaacaatagtgtttttattttaaactttatctctgctcatacaaaactttattgtgtcgtcttgttcgattaaaaataaatgtttaggccgtctccagcgagcggatgatgtccgaatctccaggatcggtgatggacagggtgcacacgcggaagtatttaccacaggcggtgcccagctcgatgttggtgccgctgtagtgctggacttcagtcttggccagcatagcgtagtactcgatctcggacttcctgcaatgtgaagagcacatgttagtaccgatataaaggcgcttggaacagatgagccattggttcgagcgtcagaaagagtctctagtataaaaaggattcgtcaaggcattcggaatcaataggatcatcattatgggcagtagactacagctaggtgtttatatgccggcttcttaccccaagtgatgtgcatgcccgttgttggaggaaccatttggaagcgccgtagactaaagcgaaccagtcccgaagcttgagattgattgattgcactgctccactactcggaatcatacttctcagtcagctttaagggcagactccatatggttccatcaaaaacgtggtcacttgggcacagtggaaacctactgcttagcagcagacgcatgggcatctcacctcagggcgggcgtgttgctggcgatgagcaccagtttggccttgccctggcgcagggtcttcaaggtctgcttgtagcccaggcagtatttgccggacttcatcaccagcgccagacgggcgttggtgctctccagagccttcttttgtttcttaacggccaccatgttgatagtttgggttaaagcactgcaggcgatagaaattagttagtcgagtgattctgtggagccggatgaaaaattaaaacacccaccttcgtcggctgacaatggcaaaagaaagaggaagaacaggcggaaatgggtaccacgtttgtgttggtgtgaccgacggggggatgcgagaaaataccaccaattaatacaaatagggttaaaataccaattagcgtgtacacaatccacaattagcgtggacacgcaccgaaactatcttttagccagtacaacctccaaagttatgacgattggtaacgccgttttcgacttcgaatatttgtagttgccaaccttcttgaagattgtatgcgtgcgtgaatttaaatttttttaaatcgtgataatgcgtcgagcaacaatctaagctaaaattagatggcacggcgtttattgatgcgaaacatatgcaatgccaacaatcttaatatgattctatgctttagctctttgaacctttaaatgttggccaagcacccaaagtgttgaactatagcatgtgttttatttaaaatctatttgtgatagagcttaaaacactaaacagtgggtgtgggcattaaggtatctacaactgcgtgattggaagagacccagttgctttgtgacggctcacaaccccggattgctgtgtcaagcttttacgtcgaattattgaataaatagttccgcacggcgaacgggtcggcaacgccaaatgaattatacaacgtggattagggagctccaaggagggcggcacggagcatcctcatccgcatcctcatccgcatccacatccggagtcagagtcagtcgcagacggctaccggcacgtgacgacaccacaacccaatgccaacccatggcccacagtcataaagttgcctgtttgggagtcctgagctcatcatcatcggctcgttgcgtgcgtgcgcactcgactcgcttccagacaatctgtggcctgggccggcttatgaatgatgcacaggctgctg

SEQ ID NO: 42752 - DNA, 468 bp, DROSOPHILA
cgcctgcagtgctttaacccaaactatcaacatggtggccgttaagaaacaaaagaaggctctggagagcaccaacgcccgtctggcgctggtgatgaagtccggcaaatactgcctgggctacaagcagaccttgaagaccctgcgccagggcaaggccaaactggtgctcatcgccagcaacacgcccgccctgaggaagtccgagatcgagtactacgctatgctggccaagactgaagtccagcactacagcggcaccaacatcgagctgggcaccgcctgtggtaaatacttccgcgtgtgcaccctgtccatcaccgatcctggagattcggacatcatccgctcgctggagacggcctaaacatttatttttaatcgaacaagacgacacaataaagttttgtatgagcagagataaagtttaaaataaaaacactattgttttggtaaattcagtgaaag

SEQ ID NO: 42753 - protein, 111 aa, DROSOPHILA
MVAVKKQKKALESTNARLALVMKSGKYCLGYKQTLKTLRQGKAKLVLIASNTPALRKSEIEYYAMLAKTEVQHYSGTNIELGTACGKYFRVCTLSITDPGDSDIIRSLETA

SEQ ID NO: 42754 - DNA, 3901 bp, DROSOPHILA
taccgcgatccattcctattcatatcgcactatcaaagcgtgcagatagtccgtttgcatcggtcgttcagcaaggaaatggccagcggggataacgcatcggagaattcggaatccccggaactgcagcgcgtctacttgccccactacatgtccacgctgctggccaacagcggagatgtcaatctctatgccgtggccatcgatcagaggccctgcaatggaacacagaagatctaccatctggacacgatgcaggcattcaagcagaagttcaatatctccatggaaacgctgtcttcagtggccacttctgtgactttgggctcgactgtcaccggaaatagcatatagatgaaggatatatattaactaaacgaatggacaaagcaaaatactacaaactgagtagttgtagttatatctagggttaggatatgctatacatttggattattattattttaacttgtcagaacatatgttttttcacaatctttttcatgtgtaacgattgcctaaaatcacatggcagaatcttttaaaaattacttaatttactctttaaatactttgtgctgtatacacaaataaaacttgagattttgataaaaaaggtaattcatattaaattaatatatttattttgatcactaaaatatcgaagcatattaaaggaaatattttttaattaattaaagaagtcgcataatattttaaatcaattttactatgcaggatagcttttcgaatagaatagttgggggcatggagtcgacgccaagcttttggggctgatcccacgcagcttttcggcagcagctttcaatgtcccgcaattcgaaagccccggaaatggaatcgtgctctccgctggcattactgccatcgttggcttggccgctggacgccggactgctgcactgccgccgtcgcagattgtgttaattgatttcaattggctccacgccatttgagtggcccgttgaatctcccgacgatgccagcaacgatgtttgattcccagctgagtttgtgcgcgggtcgcattgtcgccgattccaccaccaccactacctccggcatggatggatgcgatggtgccaagacgatgatatgccgcgcttgtcttgtgctactgggtccgcaggatgcgtgtcacaatctggacagcgaacaggatctggccagcaagtactacggctgtactggagaggatgccgttagggatttgccaccccagttggtgctgaaaagcatctgcgagtgctgctatcagttggtgcaaaagttccacgactttcaacgcatgtgcgcagagtccttgcgcaattttgagaagctgctgcaggacatcgacatcggatgccacaaactggaggaccacacttggcacgacttggacaccccctcggagagcaacgagtccactaatccggaagcccagtcgcacgcaccctgcatcgcagcgacgcaggagattgtgagttttatctggccacaagtgtgcctgcctctggccgtaatcttatctagaatcacattgggtgcttcgctcgaggtgtgttgcctagcagccaagcaaagacaatactgctccccattccccgccataaacaaaaacatttcgacagcgtttgtttgtgttgtactatttttgtttggtgggtgatagcactcgaaaaggaggcacgtcccaatctattgggtatttttaaattttccactaataaaattgggaagatggcaacacgcctcgatttatggctcctccaaataagaaagtcgattttaaaggccagttttatctagaatagataaatgtgttccctaactttcactcattttagatattatttatagcgcctttaatatttttagcattaaaaaactaaactaaacagataagtgaccgccaaaagttcggttcacaaaatattactttcattttatcatcttctaagtcgagcgataagataatcttaatagcaaattaaggaaaaatttccactttaaagtaatgagtaaacataatgtaattcctacccttactacaaattacttaactcaaccaaaagcagtttgtttttatatgcttagaccctttttacataaaaaattccttcataatagatatgtacagaattcccacaaaaaaaaaaaaaaaccaccaccattcagtttgctatggtaattaaatatataataccctaaattttccaggaggaagtctacgtaatagaggacgagtcagccaaacaggatctgggccaggagaagctatccatttctagcaagttgctgggtgccagaaaacgacgaggagtgcgacacaccctcgagtgccgaatttgccaccgtggcttctacaaaccgtcgctgctggaggcccatatgcagcagcatgagggtctgagaccgtatacctgcgtccattgtgccaagagctatgcccgggccaatctgctggagtcgcacctgcggcagatgcataacaatgccgacgctgcgcggatcatctatgcctgtccgagctgcaacaaggtgtacacagcgaaccgaagtctcaaatatcacatgagaaggacgcacgaaaggtatcacgagtcagagtccccggatgcgcggcacatttgtgaggagtgtggcaagtgctttgcgcgaaaggcacatctaacgcgccacaagatggtccatggtagcgttgagggtcggagatactgctgcgaatgctgcgatcgcagattctacaccaaggagaacatggtggatcatctgctgcgcaagcacggcaataagaatctgctgctcagatgcagaaaatgcggacgcattttccagaacagcgtggagctcaacgctcacgggaggaaacacaaagcgatggatgtagttcaataattcgttttatttgtggtttcaataacatcaagctaacacaactgttacaatgattcgaattacttggaattttgttatgccagtattgtgggagaatgccgcataattggagatactaagacgacgcgaatggttgacgaatcgatgaggctgccctaaaattagctaacattcacataatggccggcgcagcagcatagtcgcttaaaaatcatcagtacaaaaaaatggcgatggcgatggcgcgcactcgcagtagttctcaaaaaagtaatcatgcgtatataaaacaattaactaaaatttatccttaagcttaaagaacggatgacagttttaaaattacattaccaatacattcatttatcattaatttgtagggaggaggaaagaaatgagaataaaaaccagattatccgtcaatcgatcgacaattacataagaaacgcacggggtcttttgccaaatgaactatcagcattgaacgttgttgaaattgatctggtgatccacttaactgatggtactgtgttacggtggtgattgatgattggtttgttggttggcagtaggtcttcggatgagtggagttgcttgcactatatgtaaataaatacgccgcaatatgagcataggatatatgacaacgaattgccaaactctaggtgtccttgtgcttctcgtagaaggcgtctagatattttttgtactccttttggtcattccacatcatcgcggcctgcgcattcagtggactctcgttgttcggttcgcccagcagggattgtatggacagcagaatggtgcgcacatcgtacagggccgaccatttgtccttcagtatgtccaaacagatggcgccctgcagatcaacattgggatggaagcaggacgtcaggaacttcaccacgggtgctgcatacggataggaattgggaaaatccagtgacaaacgatacgtttgccccgaatacaccgtgttccgtggacccgctatggt

SEQ ID NO: 42755 - DNA, 1161 bp, DROSOPHILA
atgccagcaacgatgtttgattcccagctgagtttgtgcgcgggtcgcattgtcgccgattccaccaccaccactacctccggcatggatggatgcgatggtgccaagacgatgatatgccgcgcttgtcttgtgctactgggtccgcaggatgcgtgtcacaatctggacagcgaacaggatctggccagcaagtactacggctgtactggagaggatgccgttagggatttgccaccccagttggtgctgaaaagcatctgcgagtgctgctatcagttggtgcaaaagttccacgactttcaacgcatgtgcgcagagtccttgcgcaattttgagaagctgctgcaggacatcgacatcggatgccacaaactggaggaccacacttggcacgacttggacaccccctcggagagcaacgagtccactaatccggaagcccagtcgcacgcaccctgcatcgcagcgacgcaggagattgaggaagtctacgtaatagaggacgagtcagccaaacaggatctgggccaggagaagctatccatttctagcaagttgctgggtgccagaaaacgacgaggagtgcgacacaccctcgagtgccgaatttgccaccgtggcttctacaaaccgtcgctgctggaggcccatatgcagcagcatgagggtctgagaccgtatacctgcgtccattgtgccaagagctatgcccgggccaatctgctggagtcgcacctgcggcagatgcataacaatgccgacgctgcgcggatcatctatgcctgtccgagctgcaacaaggtgtacacagcgaaccgaagtctcaaatatcacatgagaaggacgcacgaaaggtatcacgagtcagagtccccggatgcgcggcacatttgtgaggagtgtggcaagtgctttgcgcgaaaggcacatctaacgcgccacaagatggtccatggtagcgttgagggtcggagatactgctgcgaatgctgcgatcgcagattctacaccaaggagaacatggtggatcatctgctgcgcaagcacggcaataagaatctgctgctcagatgcagaaaatgcggacgcattttccagaacagcgtggagctcaacgctcacgggaggaaacacaaagcgatggatgtagttcaataa

SEQ ID NO: 42756 - protein, 382 aa, DROSOPHILA
MFDSQLSLCAGRIVADSTTTTTSGMDGCDGAKTMICRACLVLLGPQDACHNLDSEQDLASKYYGCTGEDAVRDLPPQLVLKSICECCYQLVQKFHDFQRMCAESLRNFEKLLQDIDIGCHKLEDHTWHDLDTPSESNESTNPEAQSHAPCIAATQEIEEVYVIEDESAKQDLGQEKLSISSKLLGARKRRGVRHTLECRICHRGFYKPSLLEAHMQQHEGLRPYTCVHCAKSYARANLLESHLRQMHNNADAARIIYACPSCNKVYTANRSLKYHMRRTHERYHESESPDARHICEECGKCFARKAHLTRHKMVHGSVEGRRYCCECCDRRFYTKENMVDHLLRKHGNKNLLLRCRKCGRIFQNSVELNAHGRKHKAMDVVQ

SEQ ID NO: 42757 - DNA, 4661 bp, DROSOPHILA
gtcctggagcagtacaagcaacagcttaaggcgcacgtgcagcagcaaccagagtccgccaacggagtcctggtcctgccgccccactatgtccagctggcagcggcccttggccttagtgcccagccgctggtggatccgattgctacccgaacggattttgagcggttgatagagttgcaacgggttcaaccacatttggccggcaagttgagtcccagttttccgggaggcttggaggctgcccatgtcgctgccgcagcagcggcttatgccaacagcatggctgtggccgcttcagcaggagcctcagttgcggcaatggctacttccggtgccggaacgccaacggtgcaccaagagagacctgcctcggtggcagcgtctgtcagttccggcgtctcgatgtcggaactgaagtccatgcccgccacgcagcaatcctcaccaagatccgagagtggcatcggttccaatgagaacgaggctccggcgaccagtccgcgaccccagacaagcaacgccgctcgtcaggctctaaggcaacgccaggaggaggagtatcactacatggcccaggcggcagctgctgcagcagcagctgggcaagatgagagcatgtggcgaccctggtgagccgttaggtcagagatcctacgtactaagtatgtagacaccaccagttagttaggggagaaccagccggcagccggcggtttgctgcccccactgatcgccaagtagaggatgacacctattgttattaccgctcgtctgtgtagctcctgcatctctccaaattgcatttccaacctgtgccaacgcccaagactctctacaagatgggttccagagccaaggagagctaccctttcatttatgtatgcatttgtttttgccctgaactctgcgttaaatgtatttaattcaatacataaagcaaaaatatttacaaaaaaacttgaattctgttttgaaagtggtcggggtacgggaaaaattacgttcttgtttttggtaattctattgaatcattttagcaattttattaaggtatgtactataaatacgatatagatccttgcggaggtccaataaatacttgtattatatattagttatataagttttcaaacaagaaatgagacttagcctactcttcaggttcatgctttctactttgatttcattgcacttagggatttgcggggcgcggactgccgctggcgggcaaggaatgtctggccagagcccatcaatattgccagcttagagtcgattgcatcacgctgggcattgacacccagtctgtagaaagcggaggtcatgagttgctcctccatcacactcatcttcggcttgggctcctcctcgacgagatcagcactcttttccagtacgctagcatccagagctgaaatttcaacaattattgtaaatttttgttatattttccagcacttaccactggcaattcgaggatctatgcttttgatcacctccttagctttctccacgcattttcggtatttggcgtcatacaccagaatttcctgctcacgcgctgataaattggtttccagctgagtcaccttgcattgcagagacgtgctctgggtaactgcttcctccagttggagtgctgtgttgatataaaatattagaaggcttttttcttatggcagtaatcatgactcactcttttgttcatttagctccattaactgtttgatttgtttaccaaactcgctcctgggataaaagaaaagattttgatagaaaattatacatgcaatagtgaaaatcttatatttactcttttaaaatgggatcatcgctttgagaagcatgcgacagggaaagaatgcgttcattggctgtttttagctgctcacgcaaattctcgcagcgtttattggcatcgtccagcagttgctgcaaaaaatgtgttttaatataaagtggccaagttatgctatctaatattactaaccgccaaagctgtctggccaccctgtccctcgcgcagagccttgttctccgcctccagtcgctgtagtttttccactgtggccgacggttgcagttccctggaaaccgtggtgcctgtcagcgctgtgttcgaggacaattgtccgcatttcagctcgtcgactgcctcgcgaaggttgtcgcgctccttgagcaaactgtctttggcccgctgcagagccaggttcttgctttccaaattcttgttatcaaactccaactttacattcttgctgctctcggcgtccagcttggcatgaaggtcttgaatctctttcttgaacagctccacttggcctttggtgttggcatatcgtttggcatcctcctcaaactgcgcattctgctgcacatagtcggcgctacgctcctccagaatttttacttgttttttcaggtcgttatagtcttctagcttctttttatacgtgtcaagctgggcctcgcatatcttaagcttgtcgttggactcccgcagaacatccacttcatccttcagtgtggtcacttcagcggaacttttctgtaagaaaatgatgataacataaaatttaaatgtaatcgtgttgaccgtaccattaattcctctatgcgcatttgcatgtgcagcagatcggtatcttgttgctgggccttgattttaaggtcctcccgagctccttcagactgaagaagttcctcttttagtaggtccaattgacgccggagttcgttgtagcgcacagatcctgtttgaactggccccaaagagactccatcatctccgatcaccgtggagtgttgctctaggcgggcaaactcttgctgcagcttatgcaactcctgttggagattcgttttctcgtctatgagaaggagcattttcttttccgtctcgaagcatttttgtgccagggcgtcgcgatcctcctgaactgccttgctgtccaggagtcctgtgcgagagccacgggacaaggaactggctacaccgccctccggcgtggatgcttgcctagtggcctcaagttcctgaagggcgcgcataatgtttgcttgcagttcctcctccagacacatgatctctgtgatgtaggactgcttctctgcacagttcacggcgcaaccaaggaccaactgcagcagacgctccagctctcccaagtcgcacttctcagcgatcctctgcagatcaggcttcgagaaatcactcagcgagtagttcagtacgtcgctgtagtagtcgtacacggactgggtcacctttttaagattgctcatccgcaatcgccagttgctgcccacggcactggccttgatcttggaaagccaagcgtcggtgaaggattcgggggcgaactggttaagagcctgtgaataaaggagctattaaatattgatgaactatatatgtatatatagttacctgagccagtgccactccgtcagctaaggattccgcatccgcatgcggggcatttagattgagggtcttgaaccactccagcaagctatagtacatctcgttcttgggcgcggacatgttgcaggtgtgaacgaaacgctaaacgaaacaaaacaaactaaaaatatgcacaatttcacaaaaaaagagctctcagctgttgcactaaaaaccaaaacatacatcgaactgcacgacagctatcgaaagccattgagatgcactttctctatcgatagaaaatatcgttatttattatttatcatgtttacaaaattaaacaggaattaaatatgtatgtttataaaaatataaatgttaatatttaaattaaaattaatacattttaccctagagcttttataattttaatatcagtaacatcgaagtttgggtacaacctcatgttaataaaaataatttttaatatattctgtcaatcattgcttatattaaagtcaattgccatggccgaaccacgcccaccatctagtgcctttagcatgcactgctccgcccactttagcttctcatcctgctccttaatcttgtccagtggggtccagctcaaatcgtactccaacctgtagctgcctttgaatgtttggtcaacggagagactccattcctgaaagtgtacatccattaataatgcgattttagaattattttcaaacaaaacgtacttccggtgatagcatgctgaaatagttttgacccgatggcctttgataaagatgatagatgtgtccgggttttttggtgaaattgcaggccgcactgtgcagatctcggttgagagtggactccttaagtatctccatcgcttgggcctgaagcattttgatctatgaaagatttattagtttgtattataattgttaaagaggagtatagcttacctgctccattatgacccccagcttttggcaagttgtgtttttcaattgtttatcagcattctgaatttgttgggccaattcgatgatatcctcctcctggtgcatggacacacgcatggggtttatctgcaactggggattcctctcaaccagttgggctaaaaaatacaatatttatttgtttacctctcagtagttatatcatagaagcgtacccttttttacagctgtctgatacgtcaattcgtccatttcggccgctcttttcatcacacgctaccgaa

SEQ ID NO: 42758 - DNA, 2323 bp, DROSOPHILA
gatgtatgttttggtttttagtgcaacagctgagagctctttttttgtgaaattgtgcatatttttagtttgttttgtttcgtttagcgtttcgttcacacctgcaacatgtccgcgcccaagaacgagatgtactatagcttgctggagtggttcaagaccctcaatctaaatgccccgcatgcggatgcggaatccttagctgacggagtggcactggctcaggctcttaaccagttcgcccccgaatccttcaccgacgcttggctttccaagatcaaggccagtgccgtgggcagcaactggcgattgcggatgagcaatcttaaaaaggtgacccagtccgtgtacgactactacagcgacgtactgaactactcgctgagtgatttctcgaagcctgatctgcagaggatcgctgagaagtgcgacttgggagagctggagcgtctgctgcagttggtccttggttgcgccgtgaactgtgcagagaagcagtcctacatcacagagatcatgtgtctggaggaggaactgcaagcaaacattatgcgcgcccttcaggaacttgaggccactaggcaagcatccacgccggagggcggtgtagccagttccttgtcccgtggctctcgcacaggactcctggacagcaaggcagttcaggaggatcgcgacgccctggcacaaaaatgcttcgagacggaaaagaaaatgctccttctcatagacgagaaaacgaatctccaacaggagttgcataagctgcagcaagagtttgcccgcctagagcaacactccacggtgatcggagatgatggagtctctttggggccagttcaaacaggatctgtgcgctacaacgaactccggcgtcaattggacctactaaaagaggaacttcttcagtctgaaggagctcgggaggaccttaaaatcaaggcccagcaacaagataccgatctgctgcacatgcaaatgcgcatagaggaattaatgaaaagttccgctgaagtgaccacactgaaggatgaagtggatgttctgcgggagtccaacgacaagcttaagatatgcgaggcccagcttgacacgtataaaaagaagctagaagactataacgacctgaaaaaacaagtaaaaattctggaggagcgtagcgccgactatgtgcagcagaatgcgcagtttgaggaggatgccaaacgatatgccaacaccaaaggccaagtggagctgttcaagaaagagattcaagaccttcatgccaagctggacgccgagagcagcaagaatgtaaagttggagtttgataacaagaatttggaaagcaagaacctggctctgcagcgggccaaagacagtttgctcaaggagcgcgacaaccttcgcgaggcagtcgacgagctgaaatgcggacaattgtcctcgaacacagcgctgacaggcaccacggtttccagggaactgcaaccgtcggccacagtggaaaaactacagcgactggaggcggagaacaaggctctgcgcgagggacagggtggccagacagctttggcgcaactgctggacgatgccaataaacgctgcgagaatttgcgtgagcagctaaaaacagccaatgaacgcattctttccctgtcgcatgcttctcaaagcgatgatcccattttaaaagagagcgagtttggtaaacaaatcaaacagttaatggagctaaatgaacaaaagacactccaactggaggaagcagttacccagagcacgtctctgcaatgcaaggtgactcagctggaaaccaatttatcagcgcgtgagcaggaaattctggtgtatgacgccaaataccgaaaatgcgtggagaaagctaaggaggtgatcaaaagcatagatcctcgaattgccagtgctctggatgctagcgtactggaaaagagtgctgatctcgtcgaggaggagcccaagccgaagatgagtgtgatggaggagcaactcatgacctccgctttctacagactgggtgtcaatgcccagcgtgatgcaatcgactctaagctggcaatattgatgggctctggccagacattccttgcccgccagcggcagtccgcgccccgcaaatccctaagtgcaatgaaatcaaagtagaaagcatgaacctgaagagtaggctaagtctcatttcttgtttgaaaacttatataactaatatataatacaagtatttattggacctccgcaaggatctatatcgtatttatagtacataccttaataaaattgctaaaatgattcaatagaattaccaaaaacaagaacgtaa

SEQ ID NO: 42759 - protein, 679 aa, DROSOPHILA
MSAPKNEMYYSLLEWFKTLNLNAPHADAESLADGVALAQALNQFAPESFTDAWLSKIKASAVGSNWRLRMSNLKKVTQSVYDYYSDVLNYSLSDFSKPDLQRIAEKCDLGELERLLQLVLGCAVNCAEKQSYITEIMCLEEELQANIMRALQELEATRQASTPEGGVASSLSRGSRTGLLDSKAVQEDRDALAQKCFETEKKMLLLIDEKTNLQQELHKLQQEFARLEQHSTVIGDDGVSLGPVQTGSVRYNELRRQLDLLKEELLQSEGAREDLKIKAQQQDTDLLHMQMRIEELMKSSAEVTTLKDEVDVLRESNDKLKICEAQLDTYKKKLEDYNDLKKQVKILEERSADYVQQNAQFEEDAKRYANTKGQVELFKKEIQDLHAKLDAESSKNVKLEFDNKNLESKNLALQRAKDSLLKERDNLREAVDELKCGQLSSNTALTGTTVSRELQPSATVEKLQRLEAENKALREGQGGQTALAQLLDDANKRCENLREQLKTANERILSLSHASQSDDPILKESEFGKQIKQLMELNEQKTLQLEEAVTQSTSLQCKVTQLETNLSAREQEILVYDAKYRKCVEKAKEVIKSIDPRIASALDASVLEKSADLVEEEPKPKMSVMEEQLMTSAFYRLGVNAQRDAIDSKLAILMGSGQTFLARQRQSAPRKSLSAMKSK

SEQ ID NO: 42760 - DNA, 7056 bp, DROSOPHILA
ataagaccgaaatattaagtattaagcttttacgaccaatggtaatgcgaagtgctcaaacttggagatcaccaatggagattcaaatttaagttacatgtggaaaaaactgtatacctgcattatttcaatcatttcaatagttgttcagcttagacattgattaatgaactagtgatatttttagaaggtgcttcaagcttttctacagtaactttagatatagaaaatagaaaaaagtttagtaagtaaataagacgtaaaaaagcatatggatttaagatggatatgtgatttaaaaaacgttcttttagaagaacttgtgctgattgccagctgttagcctaaattgctacatcaattttaaggacgcattttttgtttgccaacattctcttatcaatggatcttctattctgatgtatggccaaaaaatatcacgcggaagctattagttgcgccaaccgcagaaatgaagcatgaaagtattatggctattagttgatgtacctattacgcccgacaggctaattatctttggattgttgggtacattttgggttaatcgcgccgccgtagacctttgtaaatagcacctcggcctgtggggtgacgtcagagccagccaagatgagcacgggctgaatgaaattggggtcgtctagcctttgagctgccccaaaatagtgcatggatgagtgaattaaatagcggaccggacttggacttacgtgctgctccacgagtcgattagaggagaatctgtggcatgcgccaccttgacccaggccaagaataacataacccaccaaaaccactttccatgctgcagatgggtatctcctagctgggatcggatgctcactaagtgctccactgagcctcttagcctctccactccaaccaaaattccactcaagcgtttgagtgagtgaattgcggccgagagcgtgaggtttaaataaattttcagtcaaaaaattggcagtttcgctccaagcgtgcccacgttcacatcgtcgccagttcagttgcggaactcatacacggatatatatacacatatattccggcgatcaattagagccccggaattcagccacatccctcccctgcgacgcgtccaaatattgttatataagtttaacaacttgtgaaatccacgcagtgccagtgcgtaagaccaaaagtgagttgagctgagaattacaacccccccccccccccccacatataccatctatttggttgcaaaaccaaaaaggatcgaatcgtgcattatgtaaaggcccgagaaaagcgaggtggcggggaaaaactttcgctttcacccaagtacagctggctgcagctgctgcgcatgcgcagatacattcgcagattgctactgtttgccggggataaaccagccacactatcgacttgaataaatcaggttcccaaataagatacatttgtactttttgagccagaaaagatagattcttagaatgatactatagttggtaaatatataaaattatagatatgatatatgagctatttttaaaggattttttcataggctcttttcatagtaagctattaaaatgttttctaaaatctttgcgcaataatatttcaatttaaaatgtaaataataataatatttttagttatatttcgctagctccttgaatttctcccagtgtagcacttgcacacctttgttgattgctctaaactaggtgcgtgggtgtagccaaactaaaatcgtatagttttttgtttagagccttttaattgtgctttattgacccactgcaagtgcttcgctctagtcaattatttaaaggccaatagttagcagctcttcgagagttttgtaattctgtttgctggcttaattgcccagccagaccacaagaggcccgggcgcacaaggtcttctcggccgacagccgaagttggccaataccgtaaaagccaagttggtcggttatgttgtttggttggaaaacgtactcaatgcaatgcaatttgtgcggttcgcatataaatattcatggcaagtggctattgtgcaattgccagggacaaagccatcgacgtgacggtttcctttgaccaacagccacgacctcgtcggtaattctgggtgccatatgtctagtgagttggatggccagttttccagttacaagtgcagtggaatggagttttaactccataacgctaccttgaccaaccgactggaatgggccacaaaagccttgggtggcgaacgtggttagcctggctaatgaattccgccctgtaatcagtgccattagattctgacacacatgaatataaagcgctactcatccggggaacattagcgaactattgtcgtaattgtggcaaaatgcaatctgcatgataatccggaaaggcagatgcaaatcgccgccaaatcgtaaactcaactgtttgcccattcgaaatacgaaattgagtcaaagcaaacacatattggcaatgtgcacggtcatggggtgggattgggcaagtgcacggtgagaaattagggggttacttgcgcgaaaaagccttgctcttgaatctgacttaggtagtagataatgaaaaacacaagtcatttgatgattaagtgttaactgttgtgccaaacaaaatgtattttatagtgagattcaactaagattataaagtttaattataataagttagtaagttaactagatcatcgtgtaggaatagtattaaaatcttatcgattatattctgagttatttgagtgaatgtagcactcaattgctgaatatctcaattgaccggatgtggggatgccagtcatttctcaccgtgtaatgggagtggatcggttcgagtggtgggatggtaaaaccagttttgagcatttctcgccgcctgcactccttactcttaccaaaagttggcgacatggtaagacgttggtacttcggtttgccagcttttatgctgcgatatgatatgatgtaaccagcgggctaattggcggagcggaaaacggacgcaacagaaacgataacgaaattacaaatcgcatgtttcactgctccccaatggatgagtggacggagtggacggtggacagcggacatcttcagcacgtcatggcatcgcatggcccataaatgatcgagttaccaatgcccgaaactttcataccatataaacaatacccatagccatacccatagccatacccattcccatattgaacgtattcaaagcagggcaattccatacgttcaatttattttacatcagcgtccatcgcagcggatcgattgcgttggaaactgtgtgaaggccatgaaagtgaacaaactggtcataaacagtttgttgaccaaaaaatagttggaccatccaatccggccaaccaatccggccagccagctgtcatccgatccgcaattactgggcggttactccgcagccttgcgcatctttctctcgaccttcgtctgcgtttttaaacgactagaaatttaaatgggctacgaaatgacaacaccaaacacattcgattcgtatgcaaaacagtcggtctgtcagccggcggattttgggtcacggtcaatggacctgtgtaagaccaataaagtgtggttaggcgaaaaaaaaaaaaaatacgcggaaatgccagcatctctggacgggatttggattagccaatcgatcgcgcggcatgcgactgtgggcagctgcttccaactggcgaagtaacccacgcaaggcattgcaccctggtcgctggtagccatcgctatatccagttccccagtccatttgcctgacattgtgcagccaagagtcaagtgggattaattggtatgcataaatatacatacatatgtatgtatgtatgtttgtttgttggagtgacatggcggaggtggtggtccagtaaactgcgctgacccttgagagttcgatgaattttaacatttcggattgcacaatcgccaacgaccccaagggcaaccggccaattagagtcgctggtgtcagccgtgaagaaatctggctaactggcagcgatcacttagccacttggccattttagcccattatttcgctcacggacagccaaaaaatgcagttcgattaacagatatattgaatctataaatagcttaaatgcattcaagcgatcccaatttaagataactatgactttattttactttcatttacattcatattcgttcactgagttcaagtttaaatcggtaattaaaatcagggaaataacttaattttactttgtaatgttcagcttactcagctaaggtatacttataataattgtaattatgtataataaataacagggaagtaagccctagctttttaacaaatattttaaaaaggcaattattgcaaatagttaccttaataattgagttcaaaacatagaactggatattcagaataaatgtatatttgggtttttttttctttaagtaacaatcttaataacgtgctgttaaataaattaaacttaaagttcaactttttaattacaaggtttgaaataacattaaaatctttgtttttaagcacgtatccatgcatctcgaattttaatacccgatttcatttggagcagtgtaatcaaagggaaattcagcaggtagatcgtaaacttttagggaaatcgagtaaatatttggcagctgtggcctaaactgaaaagtgaaagtgttaattggacatggcttacttaaaccactgaaatccgtgactttatgcgttctgctcacttgatttcttgattttgagcacataaattgtgtaatatggtattgaatgtagacatacacttgcaacctgtgcaatagaattttgcaactaaaacatatatgtatatgttttggcccgatttcagtgcttgagaccgaggtgctgcaacaaccgaagctgagtggaccggctgccagtagcggcggcgactatgactatccgtatgtctgcggactgagtccggcaatgaagctggtggccaaggaggagctgcacgaggacgagaacatacgtcggcaggcgctggcccagttccgcgagtggatcgagaagcatccgcatatccgcaagtgccgcaccgataccgtcttcctgctgcgttttttgcgcaccaaaaagttctccgtaccatccgcctgcgaaatgctcgagcgctatctgaccatccggcagctgttcccgcagtggttcaagcagctggacatcaacgatccggccatcaatgagatcttcgagaatggttatctggtgccgctgccgcagcgcgattccaccggacgtcaggtcatcttctccgtggccgccaagttcgatccgtacaaggtcaggatctcttttggaatttacatctatagaaacgtttaatagctatccaatgttcattccagttcacttcggtgcaaatggcgcgggtgcacagtctggtctgcgaggcactgctggatgatgaggattctcaggtggctggatatgtgtacatcaacgacgagagtggcatgaacatgggcttcgttagcctctggtctctgaccgacctgcgcagcattgtcaagtgcatccagaactcgacgccgatgcggcacaaggagacgcacttcgtcaacataccccactacgccaatcgcatcatcgagctgggcgtgtccatgctgagcgataagcttaagaagcgaatcattgtgagctcatttcgattgtcattgtaatacatgtgctgattgtattgattttttccccttcaggtgcacaagaatgttgacattttgaagacaaagatcgatcccgccatcctgcccaaggaatatggtggcaccgtgcccattgccgatatgatcgcccagttcaaacagaagttgcagcaacgccgggcggcaatccttgcactcgacgacatgcagatcgaggtgaccaaggatgcggccaattttgctggtaatgatatcggcgacatcgatgccggtgtcgtgggcagttttaggaaactggaggtggactagagcccgccgtggagcaatccccttaatcccgtaggctaagctaggctaggtctggataccattgagacaatcgacaagacgcgcgggcatgcacacttcgtacctatttaaaagcatcaccactaagttgtataactacggtctcgcgggaactgtgactccctccagtgggtcgtggtcctccaatcctcagaatcccatagttgctgggcctgtggctgagtttccacagttgtatattccatccatgcgttacgttatcttaaatgaatgtctatttaaatatatgtatatacttattcttgagaattttaattcctggcttcactttatggtttattgggatcttttcaagctgcgagttaagtgcatgtaataatatattttagaatgtccaccaagagtgagcacatgtgtatatccagtgaggataggcttcatttcgaatcccataaccaaatcgcaaaaataatacaaccaacaaatgtatggctagttcttagaacgtacttcggcagttcaaaatctgtacctaggcggtacctatgaagtacctaggctgtaactaagatttactaaaagccagtacgtagaataatgttcctatggcgcaactatgaactacttattccgtatataggacgctactgggcaatatcatcaaagatacatacttggtagaaacacctatagtttatgattgatattaggttgtgtaaaatgtttggttggtgtgttttttaaaatattcgatagggcattggttggtgtattggctaaggcatttggtgaaacacattcctaatatggaacgttttatttatttaactaatttctgccttttaaaaaaaagatgacctattattattattacccactgaatgtgcaacaatgtatctaccgtagaaacggtaagaatgggaggttgtttcgtaacgagaatcttgaaattacagtgcagtcgctaagtggttaattccgcggtgagcagctaagcgaa

SEQ ID NO: 42761 - DNA, 1193 bp, DROSOPHILA
cgtgcccacgttcacatcgtcgccagttcagttgcggaactcatacacggatatatatacacatatattccggcgatcaattagagccccggaattcagccacatccctcccctgcgacgcgtccaaatattgttatataagtttaacaacttgtgaaatccacgcagtgccagtgcgtaagaccaaaatgcttgagaccgaggtgctgcaacaaccgaagctgagtggaccggctgccagtagcggcggcgactatgactatccgtatgtctgcggactgagtccggcaatgaagctggtggccaaggaggagctgcacgaggacgagaacatacgtcggcaggcgctggcccagttccgcgagtggatcgagaagcatccgcatatccgcaagtgccgcaccgataccgtcttcctgctgcgttttttgcgcaccaaaaagttctccgtaccatccgcctgcgaaatgctcgagcgctatctgaccatccggcagctgttcccgcagtggttcaagcagctggacatcaacgatccggccatcaatgagatcttcgagaatggttatctggtgccgctgccgcagcgcgattccaccggacgtcaggtcatcttctccgtggccgccaagttcgatccgtacaagttcacttcggtgcaaatggcgcgggtgcacagtctggtctgcgaggcactgctggatgatgaggattctcaggtggctggatatgtgtacatcaacgacgagagtggcatgaacatgggcttcgttagcctctggtctctgaccgacctgcgcagcattgtcaagtgcatccagaactcgacgccgatgcggcacaaggagacgcacttcgtcaacataccccactacgccaatcgcatcatcgagctgggcgtgtccatgctgagcgataagcttaagaagcgaatcattgtgcacaagaatgttgacattttgaagacaaagatcgatcccgccatcctgcccaaggaatatggtggcaccgtgcccattgccgatatgatcgcccagttcaaacagaagttgcagcaacgccgggcggcaatccttgcactcgacgacatgcagatcgaggtgaccaaggatgcggccaattttgctggtaatgatatcggcgacatcgatgccggtgtcgtgggcagttttaggaaactggaggtggactag

SEQ ID NO: 42762 - protein, 300 aa, DROSOPHILA
MKLVAKEELHEDENIRRQALAQFREWIEKHPHIRKCRTDTVFLLRFLRTKKFSVPSACEMLERYLTIRQLFPQWFKQLDINDPAINEIFENGYLVPLPQRDSTGRQVIFSVAAKFDPYKFTSVQMARVHSLVCEALLDDEDSQVAGYVYINDESGMNMGFVSLWSLTDLRSIVKCIQNSTPMRHKETHFVNIPHYANRIIELGVSMLSDKLKKRIIVHKNVDILKTKIDPAILPKEYGGTVPIADMIAQFKQKLQQRRAAILALDDMQIEVTKDAANFAGNDIGDIDAGVVGSFRKLEVD

SEQ ID NO: 42763 - DNA, 3658 bp, DROSOPHILA
tatataaggtcagatttataaagtatgaactttttgccatttatttacttttccttatcaatttttagtaaaaacactgcttttattaataatcgcgagtctaatttattgattaaacttaaaaaagaataaatgaagttgtccgttaaagtaccagaatacccccaacaataagttcgttttaatcgatagtccatgttaataagctatcggagccgcttaatgatttatgtcaatagtgctatcgatgagttttaatttgtattaacattaatttagtgaaaaaatgtggtccgacacaatattaattgtttttatatcggtttgcaccgccttcctgggcgaaggtaagtaaaacgccagttaatttagttaaccctacatatttgtttgcctaggtcttacatgggtgatggtttaccggacggagaagtaccaaaagctaaagaccgaggtggaaaagcagagcaaaaagcgtaagtcggtcaaagggtgctatgaatggtcaggagctaacccgcattctgttacagtggagcgccgcaaggaaatccatggggactccctggacaaagcggtaaagaagaagatcgagcgcgacgaggaaaaactgaaaaacaacaaccgcgatctctcgcttgtcaagatgaagaccatgttcgccacgggattcgccttcaccgccctgttgagtatgttcaacagcatcttcgacggccgtgtggttgcccagctgcccttcacaccaatctcctggatccaggggttaagtcaccgaaatttgtccggtgacgactatacggactgctcctttatattcctctacatcctgtgcaccatgtccattcgtcagaacatccaaaagcttctgggttttgccccatcgcgcgccgcaagcaagcagggtgtaggtctgtttggtcctgctccaggccagttcaaatagttcaaattcattaattaaattgttgcatttagttttaatgcaccatcaacaattctagcttaatacattattcaactcgaacataggttggtcaacaatcagccggtcgaagctcagacgagagaggtcgatggttctgaactgaccatccatgatcagctcggatatggctcggcccacggccagagattgctgtactccgtgtccgctaaaaccggtggctaggtacagattgttgtagtacgggtgagctcctaaaatgccgttctcgtcgtatacgttatgatcatagcagcccgcccagctatccaccacttgggcttctccaagaacgggaattctattatacaaatggggtctgatgtgctgggcgaaatattgcggatcaatcatcgcgctattatactcttccgtcgaatcttgcacgcaaatatagttgccgcccaggccatctctgcgaataaagatgcccgacggatctattgtcatgggcatattcattccgggtgcactttgggcctgcgagttgatggcgtacatgtatcgcttgcgtgcgttgatgggcagcggaacccgaagtattcctggacccacgcctatccttgctaatcgcgcgatttgttcggaactagcaccggcgcttattacacacagggcgaacttgcaagtgcgtcgcgtaccatcgggcagttggatgaccgctttttccaagcccgtgtaggcaccctcgttggaaccaagatctgtgacaacagaaatgtccgtttgggatttgaactcgaagtcgaccacctggccactgataaaatgggcgccgtagccactggctgaccgtcggaaattgctcagaagtgccaacggattaaaccagccctctttttccagaccaagacagcccaaagcgatgcccttggtgtttagccaggggaatctggcagtcagtcgatctgcagtgagaagttcatttcgggcacccagttcgttttgtagctgagaggagcgcttcaggctttccgcgtgctcctcgccagcgagcatcagatggccatggggcgtaaactggagaggcacttcctcgccaaagtgttttcttgcgcttcgcaggaagtctgcggcaaatagtgacatttggatgttttcgggcagggagaattgctgacaaagaccgcccaccgaaacacgcgtggctgactgggcatactagaaatatgtggaaggcaaattaaatattcggggtagactggtacacatcattttactaccgtgtcatccttctcgaccaccacaacgttaagaccgtcgcgggccttctccttcagccaataggcgatggagctgcccactccaccgccgccaatgatgagcacatcgcaatgggtctggaagtcatccggcacagtggcttccttgctcttgtcgcgctcccctgaaaagtgaaactggctctgtgtcggaatgggaactttctcggtctccggttcctttggtacaaagaactccttaactttgcgcatatcgttcccgagcaaacggagtgttcgtcgtatggggtgcaggtcttcgccggatttgtcgcccccggaagatccacttccattgctcgttgctccggccgagaaattacggcgctgaaggagacccaccacttgtctgtaccgcaacattttattctctttaattttaatttaattcatattccgtattaattttttattttgtgttattttgtaatagtaataacgtgcgatgttatcggagtatcgatatcgaaaaggcttaacggaattgtggtaatgttttattgcaatttaaataaaaatacgcttttactgagtgcgtaacttaagaaaaggcttaacggaattgtggtaatgttttattgcaatttaaataaaaatacgcttttactgagtgcgtaacttaagaaattcctaacccaaattaaagcaatagatacatttactgtaaaacattaaaaataaattcctataacatatgagactgaaagttcgctcagtgtaccgtaaaacgtatcgataaattgaaacgtaacggcttaacagctctgttaaccaactaaatttaccagcactgcctgtagccgaaaacgaataagaagaagaagcgacattactaggcatttttgattgggattgagaaaaacaaaagaaaagtcggctatatttgtgaccccagtaaattgagagttccattacaaaatgaccaacgcaacggacatcggtgctaacgacgtggagatggaggtggatccaacggcggagacgctggctgacgagaagaagaaccaagatgtggccgccgtgcaggagatccgcgagcagattcgtcagattgagaagggggtagcctcgaaagagtcgcggtgagtagtgcaagaattaaaatcttgtcccttccttattatggctcatttccgccaacagcttcatcctgcgcgtccttcgcaatttgcccaacactcgtcgcaagctgaacggcgtcgtcttccggaatcttgcacagagtatttaccccgctggtgcagatcgtgaggcggccgtggctttgatgcccgctgtggagaaagacgccaccgagctgcccgatgttcccaaaaaacaagttgccaccaaggctccaatcgccgaggtcgatgcctacttctacctgctcctgctggtcaagctcatcgacgccagtgatttaaagcgg

SEQ ID NO: 42764 - DNA, 1596 bp, DROSOPHILA
aaaaaattaatacggaatatgaattaaattaaaattaaagagaataaaatgttgcggtacagacaagtggtgggtctccttcagcgccgtaatttctcggccggagcaacgagcaatggaagtggatcttccgggggcgacaaatccggcgaagacctgcaccccatacgacgaacactccgtttgctcgggaacgatatgcgcaaagttaaggagttctttgtaccaaaggaaccggagaccgagaaagttcccattccgacacagagccagtttcacttttcaggggagcgcgacaagagcaaggaagccactgtgccggatgacttccagacccattgcgatgtgctcatcattggcggcggtggagtgggcagctccatcgcctattggctgaaggagaaggcccgcgacggtcttaacgttgtggtggtcgagaaggatgacacgtatgcccagtcagccacgcgtgtttcggtgggcggtctttgtcagcaattctccctgcccgaaaacatccaaatgtcactatttgccgcagacttcctgcgaagcgcaagaaaacactttggcgaggaagtgcctctccagtttacgccccatggccatctgatgctcgctggcgaggagcacgcggaaagcctgaagcgctcctctcagctacaaaacgaactgggtgcccgaaatgaacttctcactgcagatcgactgactgccagattcccctggctaaacaccaagggcatcgctttgggctgtcttggtctggaaaaagagggctggtttaatccgttggcacttctgagcaatttccgacggtcagccagtggctacggcgcccattttatcagtggccaggtggtcgacttcgagttcaaatcccaaacggacatttctgttgtcacagatcttggttccaacgagggtgcctacacgggcttggaaaaagcggtcatccaactgcccgatggtacgcgacgcacttgcaagttcgccctgtgtgtaataagcgccggtgctagttccgaacaaatcgcgcgattagcaaggataggcgtgggtccaggaatacttcgggttccgctgcccatcaacgcacgcaagcgatacatgtacgccatcaactcgcaggcccaaagtgcacccggaatgaatatgcccatgacaatagatccgtcgggcatctttattcgcagagatggcctgggcggcaactatatttgcgtgcaagattcgacggaagagtataatagcgcgatgattgatccgcaatatttcgcccagcacatcagaccccatttgtataatagaattcccgttcttggagaagcccaagtggtggatagctgggcgggctgctatgatcataacgtatacgacgagaacggcattttaggagctcacccgtactacaacaatctgtacctagccaccggttttagcggacacggagtacagcaatctctggccgtgggccgagccatatccgagctgatcatggatggtcagttcagaaccatcgacctctctcgtctgagcttcgaccggctgattgttgaccaacctatgttcgagttgaataatgtattaagctag

SEQ ID NO: 42765 - protein, 515 aa, DROSOPHILA
MLRYRQVVGLLQRRNFSAGATSNGSGSSGGDKSGEDLHPIRRTLRLLGNDMRKVKEFFVPKEPETEKVPIPTQSQFHFSGERDKSKEATVPDDFQTHCDVLIIGGGGVGSSIAYWLKEKARDGLNVVVVEKDDTYAQSATRVSVGGLCQQFSLPENIQMSLFAADFLRSARKHFGEEVPLQFTPHGHLMLAGEEHAESLKRSSQLQNELGARNELLTADRLTARFPWLNTKGIALGCLGLEKEGWFNPLALLSNFRRSASGYGAHFISGQVVDFEFKSQTDISVVTDLGSNEGAYTGLEKAVIQLPDGTRRTCKFALCVISAGASSEQIARLARIGVGPGILRVPLPINARKRYMYAINSQAQSAPGMNMPMTIDPSGIFIRRDGLGGNYICVQDSTEEYNSAMIDPQYFAQHIRPHLYNRIPVLGEAQVVDSWAGCYDHNVYDENGILGAHPYYNNLYLATGFSGHGVQQSLAVGRAISELIMDGQFRTIDLSRLSFDRLIVDQPMFELNNVLS

SEQ ID NO: 42766 - DNA, 2929 bp, DROSOPHILA
aggcagtttctggaaataatatatacgttcggactatgtatctgtagttatttggtttaaacttaaatgtacttgaaacatgatatgtttattcaaatgaaatcagagttggttaacttgtccagcttctcatagacatccttttcgttcttaaagtcattaaactgcttgaccatcgccgcgttcctggccaaccgactgtcggaccatgtgctcatgtatttctccaccttctgctctacgattttcagagtagtttccaagtttctttccaggatctgctccaggtcctcaactccgtgctgtatgaatagctgaacgacaacctcgtcagcttccgattcgaattctttgctgcctgcaatcgaaatgatgctttccagttcctcaagagcatcctccagtctgttcagctcgaatgaatcatcgaagtccagggtgtccaaggccgcgacgaagtccttaagctccctgagaatgtgtcccttggagtttggtggtaaaatgagttcggcctcgtcgatgaccaattgaaagacatgtcgtagctgttccatggcgtctgttaccatttgaaagagttcattggacacttcgaattgtaactgccatttgttaatgagaggcgctgcaagctgaaagttaaaggtttctgttgattccaaaaggatataagcaaatctaaggatcttaccgaaagctggagggcagctacagcgactagaaaagtccaagttagtctgctggccatgatttgaaactgtatctagtctctatcgaactgattccttttatattccctctcttaaattcacaatttttatacaaaatgggagaacgcctcctctgtaatgaatacccactgatcgtgagacaacgtatagactgtaatcagacttcagaaatcggtgagcgtgataagaacgagtgctgccccttcgtatattaattagtgggtagtggaaaccatgcattttgttattacaaagtcgtatatagttccaagtcacgataatatctttattgctttaaagtatcagttctcgatatctacacatgttgatcagacagtcggaaattttccggaagttaaacggcatttttcaggaataaagtcctcgtataaatagattccgaatattgttctttgaagtacatttctcattttattacaaacactttctaattctatgatattgtttaaatatttagctattaatcttaagccttcgtccatataccactggccaccccctgcaccaaagcctgagccaatttggtgtagtccattagctggagctcaggaagttggctcttcaggttctggggaaactccaagaaggttgtgatcagactgtccttggtttcggtggccaactgggtgacgttggaaaccaattccgacctgtcctgtcgactgagtcgcagatacttggtaagatgcggcttgaccttggcgaagaatctgcggatggcgatcttctcgccgggaagaacctcgacgagcaacttatcgggagtcttatggtacatgaggtcgctgtttatccaggcgaagatatagaatgcagtgctgtaatagtcctcgttcccagcaaccaggtcgagctcctcgaagtactgccgatcgatggtttcgttggccggaagacccggtagtcgttggcgggcatcttcgatggtcgtgtagagcacctgattgaagagcctctccaccgcttgaattgtatttctcaccaagatggtagggctgcgttctttcacttgggatgagtccgccagagcctggcaatcgagaggaaaatcaataagttccttatctaatccactgccgactcaccgactcaccagacagataagacccagaagcatcgaacagcaagtgctgccgccgataagaaacctcgaactgcgccctgatctcgccatgctcctctgatcgctgctcgatttagactgatcatgtcggacggatgccaaacggtctccccacccaaacaatctcgactggcttaggttttgtttgttttattaagcgcaagtagaaaatatctcaagtactgtttatacgaatttcgtagagtgagcaaattaatggccattaatgttcgttcgtggttttctatttaagctagctaggaaaaaaagatgccgtctagtcgaatgttagtagtaatctgcatacacacgagtaacattaacaattagatttgtaaattacacatcttagcatatacttaggttattagcaagctactgcattctcatattgatccggactatatgtatatatatattcatattcagcatttgtaaattggcttgtaacgggaagaaagtcgtccggataatcaaaatatgctcattcttttgtacacttacaacattttcaatctgatctctaaaggttggtaaaatcgaaaaagtgtttttaaataaatttaattgtaaagaaaagagtctggattaccaaaacatccttaataatttgtacaataaccatattttctatattatcttttaaagttgtgtaaaatcaaaaaatatcaaggatcaaggatcgtttggcatgcgataaacgtccttataactatttcattttgtatctctgcaaaagtacttatacataagtcttattacatttacgttcagaataatacgctttacccgcgattgttggcaaatgcactggcattttcaacaatcagcttaaaataattaaattaacgtccaattgacttaggaatgcatactttatagttgaatactgaaaattttttgttttgaacaattttaatccgcatttcgagataacacacatatgtaggtacacattgtagtaggactatcactgaaacaccaagttgcatattgatatatatttgatataagttatttcgcatatatacatagctttttgtgttgcagt

SEQ ID NO: 42767 - DNA, 866 bp, DROSOPHILA
atggcgagatcagggcgcagttcgaggtttcttatcggcggcagcacttgctgttcgatgcttctgggtcttatctgtctggctctggcggactcatcccaagtgaaagaacgcagccctaccatcttggtgagaaatacaattcaagcggtggagaggctcttcaatcaggtgctctacacgaccatcgaagatgcccgccaacgactaccgggtcttccggccaacgaaaccatcgatcggcagtacttcgaggagctcgacctggttgctgggaacgaggactattacagcactgcattctatatcttcgcctggataaacagcgacctcatgtaccataagactcccgataagttgctcgtcgaggttcttcccggcgagaagatcgccatccgcagattcttcgccaaggtcaagccgcatcttaccaagtatctgcgactcagtcgacaggacaggtcggaattggtttccaacgtcacccagttggccaccgaaaccaaggacagtctgatcacaaccttcttggagtttccccagaacctgaagagccaacttcctgagctccagctaatggactacaccaaattggctcaggctttggtgcagggggtggccagtggtatatggacgaaggcttaagattaatagctaaatatttaaacaatatcatagaattagaaagtgtttgtaataaaatgagaaatgtacttcaaagaacaatattcggaatctatttatacgaggactttattcctgaaaaatgccgtttaacttccggaaaatttccgactgtctgatcaacatgtgtagatatcgagaactgatactttaaagcaataaagatattatcgtgacttgga

SEQ ID NO: 42768 - protein, 214 aa, DROSOPHILA
MARSGRSSRFLIGGSTCCSMLLGLICLALADSSQVKERSPTILVRNTIQAVERLFNQVLYTTIEDARQRLPGLPANETIDRQYFEELDLVAGNEDYYSTAFYIFAWINSDLMYHKTPDKLLVEVLPGEKIAIRRFFAKVKPHLTKYLRLSRQDRSELVSNVTQLATETKDSLITTFLEFPQNLKSQLPELQLMDYTKLAQALVQGVASGIWTKA

SEQ ID NO: 42769 - DNA, 5277 bp, DROSOPHILA
tctatggctgctgttcttttctttagcggtaactatgacacaaatggcgttgagagaatctgagtgcattctacaagcacaataagagaacaaaagttctttggatttaggtgtgagcgtttgtttgtgcccgacactcgtgctcacaagtgaagtcaacgaaatacaatttactagttaaataataactaattacacatatagtttgtggtataagaaagaaatatatacttatacttcctcacttctacttaagatagtaacatccgcttgcttttgtcacatcttaactttactctgagatgctagatttttgcccgctgctgtacgtgtgagcgcgcgaatgtgtgtcggcattatgattgtacgcttattattatggccgcatacgaagtaatttccaagttaacttttcagttgagcgctggaacagctgaagaacgcgagcgtccagatcggatcgccatccgaatccgattcaaactgagacacagatacagatactcgttctcattcgcgatttaagtcgctaattgtcgcgacaagtgctccgctttgtgtgctgaccccaaacacttgtggacatctcaacaatggcgagttgggcaattccgtgtaatccgttggttcttgtgatttagttcggattttatgatcccttcatctgtgcgatggattcgtgaagtgcatctttgggcagtaactacttttaagatactttttcacacatccataagattgccccgcgcgcgtatctaattccaacggtcacgattacctattgggattgggagtggtggagagtgagctttgcggtgcaaaagttttcaatcaacagctgtttctggagctttgtggtttattttcccttctccaagctgagagcactgcactttgctgagagagaaagagagaatgcgagcgagcgcgagagcgagtggggcaggttttatcagtttgaagtacgattcatagagataagaaaaagtcggcggcgggtgttaagtcacttacacaatttatcgcttcttcgcctttgcgcaatcgaatggaaaagcggattgcattccattcccatacccggttgaagtagcagccggatcacccggacatcatgaacaaactacgggccctgctgcccggccaacattctggctccaatggagcatcccggcactccgtaactctggagccggagatcggattccagatcaccattgacaatccaaaaaacaacgatcagagcaagggttccacggcggtgcccgaactgaatgtccatctcatcgccgcgcgacatttgccctctcttttcggcttcaagatcgtccaggggtatcttataaaggtaaattagtgctaattagtcacgatatgagacatgccacgaaaatggtctgagataaaggcacactcaaaatgacagaaaaggagaatttctttgattctccaccaatttgataagtaatatagtgtcaatatatactgatttttaaacagtttttgataattttatccttgaattacgatgacatatattaacaaaagttataaatacttaaactgtgagataaaagcacttcatttgacaggaagtaaatatttacttgtttttcctaaggatgtgaattcaacagagtatagattttattttttttgctcttctgataacggatgaataattaaccttaatcttaacaatgttcttatcgtaataataatacaatttaaaaattattgtattaaacgtaaacttgttgtggtcagcacttgaataaataagttttgttatgatttcaagattcaagattgctgccaaataaacaatcaatccagatcaaatgaattaatacccatttgtacacaatagttttgtattattttctcatctcacttcaaagaccctcagcacgtcccacaatttatttatttttatatctaatattttaaatttctcaacttcttgatcacaggtgaagctttttcccggttcgaaacgcttggacagcagcattcagacgaatacatggccaaagttcaatgaaaatttcaagtttcccctggtgccggatatcaagtaagtgggatataaaaaaaaattagcaatattattataaaaattgtaaagatcctctatgaaacatgtggctcgacgtcccgcaaatggacaggtaagcagctcggatcaggagccggaacaactcttttccgggcaatttttggtctttacggtctacgcgctactggaacttccggcaacggtaagttggccatgacaagctaactaacgtggattaaatacccttcttaccagaacttcaatcgctttaacaagacataccgctcgctaaaagatagaagcaccagctttgtgcagcgtttcgtggatccaactgcgagtgctccaagtgaggcaaagactgaggccggcggaaagccaagtgaccagggaaagggcaggaagaagtcgtcggagagctccgctcgggatgcgatgccaccgctgaccatcagtgaatcgcgcagaaatataggtaatgtaacccagatctatagaagtatcttaaattgtgcaaactaagctccaattctactgcatacttttggacaaattttaaatttctcaataattttattggttttattggtttgtgaaaatgaggggtatattttccttattataaactatataatacatatatttaattaaaaatgcagtagatatactattgctttacataatattataccctttacttatatagacaaataaaaattcaaattcggatagatagtcattaatctgtaaatgttgtcctatatttttgtctataactttctgttcgatctgcatctttttctgcttcaggttccgtcacctgttacctggaatcgaagctcttccagcgcaacagccgcacggggtgctattccacggaagagctgtggctgcctatcaaagatatcaccacgacggtggccaagtcgtcacccagcaacaacaatgtgagtaggaaaacaacatgtgtatagagtatatagtacctgacccagagcattgctaaacaagttcacccgaaattggtgttacaaaacaaaatgcgacatgcggacgacgggtgtttttttttttttcaaatgtaatggagatgtgtgcgccttaattgtgcaaagtgaaagcttcccggttggtcgggaaaaccacaacaacacagccactataaaatttaaatgaaagcaaattttttaattgcaacagaaacactaatgtgcaggctgagtcaatattacgccggaaaaaatgaattaaaaagccaacccattgcgtttttttcccctcacctaatgtggcgatatatctgaagaacctatatgttttgaaccaattttcagtgtgggtcaattcgagttttatcttatcatggcaatgcgatttcaatttgttgacaaactctataaatgccgagctttttacgcccagttggttggtatatcgtcagcagtttgcttatgaaattcaattattgattaagtatcttgtcataaatgcatcaattatgagatataggaagagtgcagtttattctaagatacttttcaacttggggaatatctagtaaattagtattattatctttcagttggttaactccaccaagggtgtggtcgaactggctctcgaggtgcgagatctcctggaatgtgagacacctgtggatatttcactgccccctgccacgcccacgaacacgcccactacaccagatcctccatctccacttgccacccatgcgaccaacaattggcaacggatgaccgccgaagtgaagcggaaaatgggcattagcaatgccggcaacagcgactccggcagatacctgctccgggtgaccaccacacggatgcgttgctccaataaggtcaaggatgagctggaggccacggcgagctccggtgtgtatgtgaagaccacggccttcgagcacggcatctacatagacgcctggaagtcccccattttctttccctcgctgtccaccaagtgggacgatggatccggtgagggtacgatagatataccgctccagagactcgatcagttggaggacatcgtgctgcgcatcacattggccaccaagaagatgggcaagaaactggtgctcggcaccgtcatagtcggcggagatcaggcgggggatacgggctccgagcagatgcgactcatccgggaatccccgccaggtcagcgggtggccgcctggcactgttaccactaagccgtactcaaatcaacacgccaaactgaatgtacatagcaaaaatcctaagtttaatgatatagaaattcccttgtgcatatatatgtatttctgctgtatgcatttactttgcgatcgttaaaaatattaaatttaattgcgaattgtgaagtgcttctttgggaaagtttggctcatttgaacgtccatggagtgtaacattcggtttactgccattggaagtacaatagctgtgcagtgaaaataattgtgccttatttggtttttttgcaaataatcagcatggaagggtattttttttttaaagggattagtttcaataattgtccatcgaaaatatttcaaaaaaagtttctcaaattaaccgggcccgcaaatattttgattttattcatttcaaatttcacaagctcagtaatgggtatctgttagtcgatctctagtttcgatgattatgcgtttatgagatcctctgcataaacaaaagaaacattcgtatcgaactgtggccttttgtcgaatatccatattaaagatagcaaatagtctccagatggaaatggcagcttcaatttctcgggcctgagatagaaatcctttacgacttgcaggccctgtggtaatgcaatgttgtgataccaaattaaatgttgagttattaattttaaaatacttaccacatatgggcacgtgtggtttatggtggagaaatctttgaagagatcgaatataatgcgtacaaacggatggaagttggtccgcacaaagcgacaagcatcgagttttacgtctaataaccaaggcttaaaaccgttggcctttttaaacagcttgacgtgaactattatgttattggccggatgtagaaccgttccattaaagttgagtaagaccttctcacgactgaccgccttcagacgacaattgtggaacacaaaccaggattgattgcgacttagacaggcgaagttcgtaaacttgaagacgacggcatcct

SEQ ID NO: 42770 - DNA, 1578 bp, DROSOPHILA
gttaagtcacttacacaatttatcgcttcttcgcctttgcgcaatcgaatggaaaagcggattgcattccattcccatacccggttgaagtagcagccggatcacccggacatcatgaacaaactacgggccctgctgcccggccaacattctggctccaatggagcatcccggcactccgtaactctggagccggagatcggattccagatcaccattgacaatccaaaaaacaacgatcagagcaagggttccacggcggtgcccgaactgaatgtccatctcatcgccgcgcgacatttgccctctcttttcggcttcaagatcgtccaggggtatcttataaaggtgaagctttttcccggttcgaaacgcttggacagcagcattcagacgaatacatggccaaagttcaatgaaaatttcaagtttcccctggtgccggatatcaaatcctctatgaaacatgtggctcgacgtcccgcaaatggacaggtaagcagctcggatcaggagccggaacaactcttttccgggcaatttttggtctttacggtctacgcgctactggaacttccggcaacgaacttcaatcgctttaacaagacataccgctcgctaaaagatagaagcaccagctttgtgcagcgtttcgtggatccaactgcgagtgctccaagtgaggcaaagactgaggccggcggaaagccaagtgaccagggaaagggcaggaagaagtcgtcggagagctccgctcgggatgcgatgccaccgctgaccatcagtgaatcgcgcagaaatataggttccgtcacctgttacctggaatcgaagctcttccagcgcaacagccgcacggggtgctattccacggaagagctgtggctgcctatcaaagatatcaccacgacggtggccaagtcgtcacccagcaacaacaatttggttaactccaccaagggtgtggtcgaactggctctcgaggtgcgagatctcctggaatgtgagacacctgtggatatttcactgccccctgccacgcccacgaacacgcccactacaccagatcctccatctccacttgccacccatgcgaccaacaattggcaacggatgaccgccgaagtgaagcggaaaatgggcattagcaatgccggcaacagcgactccggcagatacctgctccgggtgaccaccacacggatgcgttgctccaataaggtcaaggatgagctggaggccacggcgagctccggtgtgtatgtgaagaccacggccttcgagcacggcatctacatagacgcctggaagtcccccattttctttccctcgctgtccaccaagtgggacgatggatccggtgagggtacgatagatataccgctccagagactcgatcagttggaggacatcgtgctgcgcatcacattggccaccaagaagatgggcaagaaactggtgctcggcaccgtcatagtcggcggagatcaggcgggggatacgggctccgagcagatgcgactcatccgggaatccccgccaggtcagcgggtggccgcctggcactgttaccactaa

SEQ ID NO: 42771 - protein, 487 aa, DROSOPHILA
MNKLRALLPGQHSGSNGASRHSVTLEPEIGFQITIDNPKNNDQSKGSTAVPELNVHLIAARHLPSLFGFKIVQGYLIKVKLFPGSKRLDSSIQTNTWPKFNENFKFPLVPDIKSSMKHVARRPANGQVSSSDQEPEQLFSGQFLVFTVYALLELPATNFNRFNKTYRSLKDRSTSFVQRFVDPTASAPSEAKTEAGGKPSDQGKGRKKSSESSARDAMPPLTISESRRNIGSVTCYLESKLFQRNSRTGCYSTEELWLPIKDITTTVAKSSPSNNNLVNSTKGVVELALEVRDLLECETPVDISLPPATPTNTPTTPDPPSPLATHATNNWQRMTAEVKRKMGISNAGNSDSGRYLLRVTTTRMRCSNKVKDELEATASSGVYVKTTAFEHGIYIDAWKSPIFFPSLSTKWDDGSGEGTIDIPLQRLDQLEDIVLRITLATKKMGKKLVLGTVIVGGDQAGDTGSEQMRLIRESPPGQRVAAWHCYH

SEQ ID NO: 42772 - DNA, 2669 bp, DROSOPHILA
caggataggtgcagtttattatttaaaagttgtactagagcagtaaacaaattattggttacagagagagtgatgatgagccccttattaacagtggtataattttcgcaaattttcttagaaatttgtactttttcaaagtgtgtgttggtataagctgcactatacaactatttgttgttcaattgaactaaataaatattatttacaataaatataaaaaaatatatattcgttttataggaagtcgaatctaagattaaagcttcttctaataataaatacaaaaagcttttagttgtgacaaataaaaacagagtgaaaagaatgtaaattaaaaagttatgtaaaaattttgtttagcttaaacatacatgtagacaaaatgtagaaagtatttggtaagtatggaagtaagtaaatatacttgtagagtaaaaggctacaatagatttatagtctgaaatagaaggtaacaggtagaagaatgcttttccgaccccataatgaatatatgcacattcttcatcaggaccaatatccgattcgatctggccatgtcctttcctctgtttgcccgtattaattgttagatctcaggaactttaaagctagaaaatattattaagcattctgttgcctacgctaagcaagtttctttcaaaatattgccactccgataaatgtttattatttgtattatttatataaattatttattatttataagtatttgtatagattattttcacttgcttggaaaatgtgaagcaatcgctttctgataaccgatgaacttcacataagtgctcatttcggtttattaaaaaagttaaaaaaataaaaacgcaaatcatgtgttgtacttcgagttctgctaaatactctttatggtttttattttattttcgtcatataacgggtatttatttaaatttaccttatgatttaatcatcttccttacgtcacatttttgtataaaataataataattaataatcacagtttgatgaacataattcgagccatagtgtgtggttctgcgggtgtaaagatcggtcgtccttgatcgtccttgtagtcggcgtagggaagcgaatggacgcacttcatccccagtgcctccttctggcgggcggagtagaagcttgtgcagtaggccgtcattgcgggaaatcctttagctcgacccacatccatcaaggtggcggccagtcgtgatcccagtcctttgcccctcatcgaagattcgacactggtaatgtgggagtagagcagtttcgagatgccgaaacgctcaaagaggttggcctcccgttcaattttagatagcattatgcatgcgcgagcccaaaagtgctgctccatggactccgcctcaatgcgatgcttctccaagtcctcgggatactgggcaccggcaagtaccagtcccacaaattttccaccattgctctcgtcgatggccaccaaacacgtgccctgagcaatcatcgacaggtgatactcatcgttctccttctcgttttgactttgaacgttctcgctagtagactggcacagtggctctgattggaaaaagttatccttcaaaaaggcttttacactggggtaatcctcttttgtcatggtccttatggtaatgccgtctttaatgcttgaggccatcgtggttttgatcctaactctgaagttacttatttaacgaatgaatcgaaactaaagtaatggtcagctgatcagtgtatttatacaagtgggttatcaattttctaaaaacactatatcacaacaagagataatgctatactcgagttttccgactatcagatgcccgtaactcagctagtgattatgcgaacgcgaaaattgttctctttttgggatatcgatagatattgtggaataaaatgattaaaaattttaaaattcttccaaagtgtggtcgtgaccggttcggcggttgtagggggttagagtgggcgttataagactaataaaaatgtgaaaaaatatgtgtgggcgtggcggacttgtgtggtttctgggcctcagagtgggcgtggcaacatggttcaacaaacgctgcgtccttgccttttagcttttatagtatttgagatcttgacgttcatacggacagatggacatggctagaacgactcggctattgatcctgatcaagaatatatatactttatatagtcggaaacactttcttctgcctgttacatacttttcaaggaatctagtataccctcttactctacgagtaacgagtttacaaatttgaagcttcgtcagatttttaaactttcagcgctagtatttgttgaccttatcataattcagtttacaattaaaggtggagtagctaggcgataagatgtggatagcaactacttgggtttcgaatagctttgccgtttgaatagctatttccacttgtgtacccgtcactcgaaaagtaaattagttgagaattattgtatataagcggtacaagaaagcgtttaatagaatgtatatatgtacatatatatgtactcctgatcgggagtgtccctccgattaattttgttcgctatgccaataaaatgttaaaactaaaaactaacgggtatctgctagtcgagaaaatccacgtagcgctctttatggtttcaag

SEQ ID NO: 42773 - DNA, 669 bp, DROSOPHILA
atggcctcaagcattaaagacggcattaccataaggaccatgacaaaagaggattaccccagtgtaaaagcctttttgaaggataactttttccaatcagagccactgtgccagtctactagcgagaacgttcaaagtcaaaacgagaaggagaacgatgagtatcacctgtcgatgattgctcagggcacgtgtttggtggccatcgacgagagcaatggtggaaaatttgtgggactggtacttgccggtgcccagtatcccgaggacttggagaagcatcgcattgaggcggagtccatggagcagcacttttgggctcgcgcatgcataatgctatctaaaattgaacgggaggccaacctctttgagcgtttcggcatctcgaaactgctctactcccacattaccagtgtcgaatcttcgatgaggggcaaaggactgggatcacgactggccgccaccttgatggatgtgggtcgagctaaaggatttcccgcaatgacggcctactgcacaagcttctactccgcccgccagaaggaggcactggggatgaagtgcgtccattcgcttccctacgccgactacaaggacgatcaaggacgaccgatctttacacccgcagaaccacacactatggctcgaattatgttcatcaaactgtga

SEQ ID NO: 42774 - protein, 222 aa, DROSOPHILA
MASSIKDGITIRTMTKEDYPSVKAFLKDNFFQSEPLCQSTSENVQSQNEKENDEYHLSMIAQGTCLVAIDESNGGKFVGLVLAGAQYPEDLEKHRIEAESMEQHFWARACIMLSKIEREANLFERFGISKLLYSHITSVESSMRGKGLGSRLAATLMDVGRAKGFPAMTAYCTSFYSARQKEALGMKCVHSLPYADYKDDQGRPIFTPAEPHTMARIMFIKL

SEQ ID NO: 42775 - DNA, 5083 bp, DROSOPHILA
atattgtcatttgagtgtaccggttatgcttattttcccgagaatttttagaaccagtcatagaactaataaaactttttgaagccttcattaatttcgaatctccctttgaggtcagacaatcttaaaactgacgccattaaattatgtctaacatactcaaactagcttaatttcgaataaaagtaacaatttttatagagtgaaaaattacagattattatttttacttgaaaacatcaactttattatactcgttcatgtcttagctcattcaaatcagaagtatagttatgaatattattcacaacttgattgtgactcaaaatggatcatgatcgccttcaagtgaatatacttatctgttgtaaaacttggcccatttacacgatcagtactcagcagcacaatgaggcaccagaatgtgtcccgttccccggggatgtggcgactgcagggcgttggtgaagaggttatggcaatcggttatgtcggtcctcgacagacgtcgaagcctattttcgactgggacggatgcagggatccgccggatcggtcggcgaaaagcgtgtgttatttatagagcggcgtcgcgtcgccgcctggcgtcccatttggaactggagctgggactgtggtgtaccatggtatatcgcaccatacatacactttcctcggggatcacactgcgctggcagacacgagactgtcgagagcaatgacacttcaaataaaaagcggcgacatgtctgatttatagtggttggatgtggatgtgaaagaggatgaggaggcaggagaacagggaagctgggcagcgaatgtgggctccttgaggccagcaaaagaagtcgtagggcgcagatcgcatttcacactcgaccccgcagtaaagtgggaaatccaaaacccaatctttattacacacacacaaattcctattgtttccatccatcagagtggctatgtgcaggaagcgaagagggaaatttgggatgcgatggctcaccatcgccatcgacaccatcagcactatcaccacggatcatcgcattggatagatgggcggcgggtgcaccgtctccggatgccacacccacagcgctggagtgggcggcggcgatcgctcaatcaacaccagcccttcagtcgctggtcccagtggtcaccatgcgacgaggagtgcgtccgccggcgggagcggttctgcaaggtgaagcgcaagtgcggacacaccaagcacgtggagcagagcaagtgcagccagtgagtatccttaaaataaaataaatactaatagtgtttataatttaacattatgcaagttgttggagattgtggagatttaaccagagaagtttgaatattaagttcgaattttatatacttaatatattaaagtaaagtagttctttttgcattattttatacctataataatacttaataacctaaaagtatgaatcatataaaacatgttttatttaaggctttctagaattttgattacatttctttaagtgctttcaagtttgtctggtgcaaattaaaagttcataagcatattgacttatttttaaacccatttagcacaaagtctagcaagtctagagtacatgtgcattacgagtatgactatttatagcattggttcacacaaaaatattaagaatattttttaggccacattttttagtttgtttatacccaaaaatttctaatttgagcagcgtatcctattacttttcatacttgagaacaaattatgtgtgaaataccctcagatcttgagtatctttttatactacacagttgtcatcctgcacctgcaataaagtggcagccaccgttaattctggatgatagccacatccgcgagagaatccaaccgcttccgcaaccccaaccacaaccaccacctcctccgcctccgtcgattattataaatgcggcagctgcggcgtcaagtggtcccactgtggattatcgctacaccgaatacaagccgccaccaaactatgcttcactttatccatcaacacatccacctatttatacccccacttaccccgccgctcatcctccaacccaaccaccaacttatccgccgccaactcatccaccaactccaccaccgacacctccaacaaatcctgatgaagtggtgcgccacctgccaaaatatccgggcaaagatatattcagcgaagaggatgtggaagatgaacttgaacccgaaccagatgaggatttaataagttccgatgagcagggtgacttttttgtgctcaaacatcatcgccacaggcgaaggcaaaatcatagaagaccctcccacaggaaacctcccaaggaggaagactatgacgactctgactttgtggactttggcgaacggaagtcactgagacacagacatttgggtgaggatagcagcgtggagggtgatgtttttcagtacgaggacttcgatttacccgacactatgtacgcggattctcaggaatccgagggggaatttcgtaatatcacctggatgcagccagcaaaggatggaatagctctcaggcgacgcaaggtctactccaagtggagtagatggaccaaatgttcgccaaaatgtacgacgaggagatacaagtaagcaggatatttatgttaattttcttcacccattcccagtcagttattttgaattcttcagaattcagatgatatttcgaatatatagatacattttcattgaaaacaaaaagatatatagatcaaagagatgcctttaaaaatcccattaaacaattaaaatttacaatcgttttttacacaacaaggccaataaagaaatgttgtacatcttcaggaaatgccgcatcatggatcagtgtggccgtgaggttctccgggagatcgcctactgctacacggagggcagcttctgccagcagtggctgcagacgcagttccagaagacaccagcctttgagacaagaccgggatcgggatcaccggccaatgcgatgcgaaggatgcaatcggagcagccggaagtgtccatgaatgacctcaactacataatgacgggaaagggttaccgcggaccggagtacactcctctaaagctaagctgcggcattgttcgcagtggaactggacggaggagcatgtccaatatgctgaagatcatcggaggacgggcggcgcgcaagggcgagtggccatggcaggtggctatcctgaatcgcttcaaggaagccttctgcgggggcacactaatcgctcctcgctgggtgctgaccgccgctcattgtgtgcgcaaggtgctgtttgttcgaataggtgggttaccatgccatgggctattggatttcgaaagctatatcatttgtacttctttaggggaacacaatctcaactacgaggatggcacggagattcagctgagagtgatgaagagctatacacatcccaactttgataagcgcaccgtggatagcgatgtggcattgttaaggtgggtttgtaactacatcttagttaaatatcccattaaaagtgaccttattttacaggttacccaaggcggtcaatgccaccacttggattggttactcctgtttgccgcagcccttccaggcgctgcccaaaaacgtggattgcactataattggctggggcaagcgtcgcaatcgggatgccacgggcaccagtgtgctccacaaggccaccgtgcccatcataccgatgcagaattgccgcaaggtttactacgattacacaatcaccaaggtactaacttgtggctaaagattaagttatggaataacttatggttatatattttagaacatgttttgtgccgggcatcagaagggtcacatagacacgtgtgctggggattcaggaggtccactcctgtgtcgggacaccacgaagcccaaccatccgtggaccatatttggcatcacctcgttcggcgatggatgcgcccagcgcaataagtttggcatctatgccaaggtgcccaactacgtggactgggtgtggtcggttgtcaactgcgatggcaactgcaagatgcactagcatctgtggcatctcggtggttacttcgtagacatggacttgggtccgctaagttgcagaggctgtgaaaaactaatttacactttaagtgttcgaatcgtgcgagaaatcttcgcatgatcaccacaacacaattattatgtgctcattttgaactagaagttgcaaaggaacaaattcgattctaatttagacaaccaaataattgtgtaattaaagtctaaaggcacgtactaattgaaagtactattacttaccacttaatatagttacaattctaacttgcctaatgtacataactgaactcttaatgttttatgctaaacaattactaatgaaattattaatttcttctttaaggttaatataattacggtaggcataagttaaaacaggaatctgagatttaaggttgtaaaataattaataaattataaataaaaagccatatgaactgtaaaaagttaaattgctgtagcttgaccactaaaatacactacaattaacacttagatcctcttaaatggaaatagataaggagaaattcccctataggcgtaccaaagaatcgcagatatgtatattacttattagtttattatattggtgttaaatgctgcacagttttgcttccacaataaaactatttaacgtgatccctatacacattctttttttttttactactacgagtacacaatgaattataaaaacaaacgatcacaatagagaggtgagtgcgtgggcacacatgcaattaatgtatctgtataaaaacatttcatataaattggtttattggttcggtcatcccagcatcccagctgcctaccgctcggctaggacaaagtgaagtgccacggaggacaggaggaccagcagggccactgcgattcccaccatgtaaaggctgcgcgaaagttccggctttggcatcgaactggtcataatcccagaatcgtctatgcaatcagcgtccatcttgcaattgttgaagtgc

SEQ ID NO: 42776 - DNA, 2202 bp, DROSOPHILA
atggctcaccatcgccatcgacaccatcagcactatcaccacggatcatcgcattggatagatgggcggcgggtgcaccgtctccggatgccacacccacagcgctggagtgggcggcggcgatcgctcaatcaacaccagcccttcagtcgctggtcccagtggtcaccatgcgacgaggagtgcgtccgccggcgggagcggttctgcaaggtgaagcgcaagtgcggacacaccaagcacgtggagcagagcaagtgcagccattgtcatcctgcacctgcaataaagtggcagccaccgttaattctggatgatagccacatccgcgagagaatccaaccgcttccgcaaccccaaccacaaccaccacctcctccgcctccgtcgattattataaatgcggcagctgcggcgtcaagtggtcccactgtggattatcgctacaccgaatacaagccgccaccaaactatgcttcactttatccatcaacacatccacctatttatacccccacttaccccgccgctcatcctccaacccaaccaccaacttatccgccgccaactcatccaccaactccaccaccgacacctccaacaaatcctgatgaagtggtgcgccacctgccaaaatatccgggcaaagatatattcagcgaagaggatgtggaagatgaacttgaacccgaaccagatgaggatttaataagttccgatgagcagggtgacttttttgtgctcaaacatcatcgccacaggcgaaggcaaaatcatagaagaccctcccacaggaaacctcccaaggaggaagactatgacgactctgactttgtggactttggcgaacggaagtcactgagacacagacatttgggtgaggatagcagcgtggagggtgatgtttttcagtacgaggacttcgatttacccgacactatgtacgcggattctcaggaatccgagggggaatttcgtaatatcacctggatgcagccagcaaaggatggaatagctctcaggcgacgcaaggtctactccaagtggagtagatggaccaaatgttcgccaaaatgtacgacgaggagatacaagaaatgccgcatcatggatcagtgtggccgtgaggttctccgggagatcgcctactgctacacggagggcagcttctgccagcagtggctgcagacgcagttccagaagacaccagcctttgagacaagaccgggatcgggatcaccggccaatgcgatgcgaaggatgcaatcggagcagccggaagtgtccatgaatgacctcaactacataatgacgggaaagggttaccgcggaccggagtacactcctctaaagctaagctgcggcattgttcgcagtggaactggacggaggagcatgtccaatatgctgaagatcatcggaggacgggcggcgcgcaagggcgagtggccatggcaggtggctatcctgaatcgcttcaaggaagccttctgcgggggcacactaatcgctcctcgctgggtgctgaccgccgctcattgtgtgcgcaaggtgctgtttgttcgaataggtgggttaccatgccatgggctattggatttcgaaagctatatcatttgtacttctttaggggaacacaatctcaactacgaggatggcacggagattcagctgagagtgatgaagagctatacacatcccaactttgataagcgcaccgtggatagcgatgtggcattgttaaggttacccaaggcggtcaatgccaccacttggattggttactcctgtttgccgcagcccttccaggcgctgcccaaaaacgtggattgcactataattggctggggcaagcgtcgcaatcgggatgccacgggcaccagtgtgctccacaaggccaccgtgcccatcataccgatgcagaattgccgcaaggtttactacgattacacaatcaccaagaacatgttttgtgccgggcatcagaagggtcacatagacacgtgtgctggggattcaggaggtccactcctgtgtcgggacaccacgaagcccaaccatccgtggaccatatttggcatcacctcgttcggcgatggatgcgcccagcgcaataagtttggcatctatgccaaggtgcccaactacgtggactgggtgtggtcggttgtcaactgcgatggcaactgcaagatgcactag

SEQ ID NO: 42777 - protein, 733 aa, DROSOPHILA
MAHHRHRHHQHYHHGSSHWIDGRRVHRLRMPHPQRWSGRRRSLNQHQPFSRWSQWSPCDEECVRRRERFCKVKRKCGHTKHVEQSKCSHCHPAPAIKWQPPLILDDSHIRERIQPLPQPQPQPPPPPPPSIIINAAAAASSGPTVDYRYTEYKPPPNYASLYPSTHPPIYTPTYPAAHPPTQPPTYPPPTHPPTPPPTPPTNPDEVVRHLPKYPGKDIFSEEDVEDELEPEPDEDLISSDEQGDFFVLKHHRHRRRQNHRRPSHRKPPKEEDYDDSDFVDFGERKSLRHRHLGEDSSVEGDVFQYEDFDLPDTMYADSQESEGEFRNITWMQPAKDGIALRRRKVYSKWSRWTKCSPKCTTRRYKKCRIMDQCGREVLREIAYCYTEGSFCQQWLQTQFQKTPAFETRPGSGSPANAMRRMQSEQPEVSMNDLNYIMTGKGYRGPEYTPLKLSCGIVRSGTGRRSMSNMLKIIGGRAARKGEWPWQVAILNRFKEAFCGGTLIAPRWVLTAAHCVRKVLFVRIGGLPCHGLLDFESYIICTSLGEHNLNYEDGTEIQLRVMKSYTHPNFDKRTVDSDVALLRLPKAVNATTWIGYSCLPQPFQALPKNVDCTIIGWGKRRNRDATGTSVLHKATVPIIPMQNCRKVYYDYTITKNMFCAGHQKGHIDTCAGDSGGPLLCRDTTKPNHPWTIFGITSFGDGCAQRNKFGIYAKVPNYVDWVWSVVNCDGNCKMH

SEQ ID NO: 42778 - DNA, 5058 bp, DROSOPHILA
aggcaaagttttatgggcgaagctgactttcagggggctgctctcgaatgaaatcactggcactttccactttatcacccactcaaaggaaaatggctctttaatcgttttaattgtcggcggaaacgaaaggatgtgctcctgcggctgccgcctcgtactgcgtgtcacgttactcatacgcaccgtaatcaatttttatgcttgccacatacgtgagttggcagccaaacgatgagccctttcccaaatatgccgaagcggagaaagttgaaagggtttctacgtggttttttaatgcaaatcgtgctgattgtaatgcgcgcgggtgggctgtacacttgttgtgatcacgtttgccaatttataatttaattagtctggcgcattaaaacacccgccatgtcgcccaatttaatattactacaaatgctaaattactttacgagcatttctgccagcaaaacgaaaagattgcgctgcttcctcacaacttccttggcaattacaacatccgctctgactcaccagttttcttctctgagtttccctaatgacacccatcaacttgatgcagaaatatatatatattctcctgatatatgtatgtatgtgaccagtcacgtcggctcataaaaaataagcaacgatggcaaatgctgacataacaaagcacaagaatagcacaggttctcgaattcacacggccgtataattagtattagagaagcaacctaaaactatagctggaataacttactctttaattatttagtaatctaaagaaaaatttttatctgttcaaaagacaacctttttaaaaatttaaaatagactcgaaaataactgaacaacttcggtgatacattctctaagtgcacgtctttctatgaaggaacagaagttttcaaaagttcttaaagcccggctttgggcccggcttattgtgcgtgagtcatgtggccgggttgagttgcaagttgcgggtgcaatgccatgcatgccaagcagcgacacccggcctcagaatgcgaggcacgatcgagatgtgctcaaaacgagcgatgatggattgtagagacctggcctaagcccatacccatacccatatccatacccacctcaaactaatcgctcctctcatcttctttcttgcaggcccatgtggtcaccgccttcgagcagtcgttgtccaacatgaccaaccgactgcatcagttgacggcgacggcggagcgaaaggacggcgagctgacggacatgcggcagaccatcgagctgctgaggaagcagtccatccaggcgggactgaccacggcgcacatgcagagcatgggcgtccagacccagggtcaaggtcaggttcagggtcaggcgctgggtcaggcgctgggtcagccgggttcggatcagaagccaccgaactcgggttcccaacgcgccatcaatgccaacaatggatccatgccactgggaatgcagcgccagcacagcaccgactccatgtgctcgctgaactccatcagctcgggctgctcggcggcccaggacaagaacaaggccaacaagaagaagggctggctgcggagcagcttcaccaaggccttttcccgcaatgccaagatctccaagacgagtcgtcatgtgggtcaccatcatcatcacaaccactcgcagcaagagttggcctctgggaaacttcccctgcacaatggtcacggtgaacccttgggactggcctcgttggccactcaacctgctcctcccctgccgaatagcaagcagagcagtcccgccaagaccgtcaccctcatagacaatgccaagcccatcgatgccattgaccaggaggatcagcatgtggtcgaggacctcaagaagcagctgcgcgaaaaggatctcgtcctgaccgatattcgcctggaggccttgagctcggcctcccagttggagagcctcaaggagatgatgaacaagatgcgggcggagatgatgtccctgaagcacaacaatgagcgtctccagaagctggtgaccacgcgatccttggctggttcggaggccagcttgggccaggccatcagtcccaatggatcagtggctggaagctctgaggtgtcgaggcgctactccctcgccgacagcaacagtcgcccacccatggaactcccagctcgacttagtgaagaacttgaactggaggaggactgtttgccacctgccccggcccccgaacaaccaccaccaccggcccccaatggcgtcagtgtggcaccccttagtcccagtacccacgtagacctaacgccaccgcctcctgccttggaggcggctcctatggccagtccggtgcacatggccagtgccacggaggagttggccgatgtgtgcgatggcaagaagatagccattgcctgttatctgggtcagccagaggcgtttgccaagtactgtgaggagctgcaggagctcgatggcttctatgccaatggccacgaggcggatagccaatcccaaagcgagaggaagtccaactataccagcgccagctgcaacgagttcgtcatagcctgcacctatatatccggcaagacgacgtggcagaatctggactacgtggtgcgcaagaccttcaaggactacgtggcgcgcattgatccgggcaccaatctgggtctcaacacggactccattacctcgtaccacctaggagaggcgaaacggggtcccgagatgggattcccggaactcctgccctgtggttacatagtgggcagcgtgaggaccctatacatttgcctccagggtgtgggaagtttggctttcgacagccttattccgcgcagcattgtccatcgatacatcagcctgctcacggagcaccgacgtctgattctgtgcggacccagcggcactggaaagtcctatctggcccgtcgactagccgagttcctggtagcccgctctgccaggggcaatccttcggaggccattgccacattcaagtaagtctaaaagagaacactatctattccagattgataactatttctcctccatttccattttcccttagtgttgaccacaagtcctcgaaggatctgcgacagtatctgggccacattgccgagcaggctgccattgccaatggagtctccgagcttccctctgtgattattttggacaacctgcaccacgcctccgccttgggcgacgtcttctcctgtctcctgagcgctgggcccgccaacaagctgccctgcatcattggcaccatgtcacaggccacttgcaacaccaccaacctgcagctgcaccacaatttccgatgggtatgttttgatgatggaccttacaaattggatcattacatatttgctttatcacttgctcacaggtgctcacagctaatcacatggagcccgtgaaaggctttctgggtcgcttcctgaggcgtcgactcttccagctggaactgcagacgcaacatccgcagccggagctggcggcagtgctggcctggttgccctccgtttggcagcacatcaaccgattcctggaggtgcacagctccagtgatgtaaccattgggccgaggctattcctcgcctgcccaatggacctgaaggactcgcaggtgtggttcaccgacatctggaactaccacctctcgccatacttggtggaggcggtgcgcgagggagttcagctctatggacgacgaggaggtgcctggaacgacccctccgccttcattaggaactcctatccgtggccatacggtccggactcagtgcctccactacggcaaatcaatgccgaggatgtgggactcgaaggcgtggccctaaccaacggtgaccaacaggatcccttggtaagatacaggactaatattgctcctttgattttcaactaatgaggcgtttcgtcaacagctcaacatgctgatgcgcctgcaggaggcggccaactactcggaggcccaggatcaggagtccgattgtgccagcctggactcgaatgttacgcccgaaagttccgctggagccgagtgaacagctatagaaaccaaccacttcgtacatgccaaatttagatgaactaactgagaggagtacgccagctgagggtccaagatatgcacccaagatatccttgcccccgcacaaatgagacttcttgcactactttcgcagcgaggttcaaaagcagttccaagagttttccatttgcaccacgtcaccaacctttccaatcatcgtttctagccactccctgccatctagagtaaattgcactttttagcgcacttgttaaaaatgcaaattgtcctagccacaaactgaacctgataacgaagcactaccatcccaaaaagcaaggaccccggctgcgtttccgaaaaacccaaatcttgagaaaaggaaacttcactaacatgaaatgttacagagataagacgagtgaattcatttttgtacatatagatgaaaactaaccccaagtcccccctatgcttaagtgtgaatctgaccgacggtctagactttttataccctttatcccagcccagagtcggcggatcatatgaattaaatcgcaactaatacctaactctactgtaaatgtagctataagtttttgctactaccaatttacaagatgtatagttgaaggaaaaagctttcactttagtttaattatttgcgtaattatcattaaatattgttacaaacatattgcatatttataaagcccaataaagcaaaataccattaacatatttattatgccaagcggcgcttaaacacaggaatacgcgaaagtgaatacgtaatgccccatcctcgataaaatagctaaatttccgaactccagatccctatcgaaagataatcttatgtaatacaaactcaagcagcaaactatatgatacgataaagcaaattatgtgtctctgtctaatttaaatgtgtgcatttatgagatatgacatcaaatcaaaataaaatataatatcgaacaataattgttttgttgttgtttctcttctcg

SEQ ID NO: 42779 - DNA, 2751 bp, DROSOPHILA
atgccaagcagcgacacccggcctcagaatgcgaggcacgatcgagatgcccatgtggtcaccgccttcgagcagtcgttgtccaacatgaccaaccgactgcatcagttgacggcgacggcggagcgaaaggacggcgagctgacggacatgcggcagaccatcgagctgctgaggaagcagtccatccaggcgggactgaccacggcgcacatgcagagcatgggcgtccagacccagggtcaaggtcaggttcagggtcaggcgctgggtcaggcgctgggtcagccgggttcggatcagaagccaccgaactcgggttcccaacgcgccatcaatgccaacaatggatccatgccactgggaatgcagcgccagcacagcaccgactccatgtgctcgctgaactccatcagctcgggctgctcggcggcccaggacaagaacaaggccaacaagaagaagggctggctgcggagcagcttcaccaaggccttttcccgcaatgccaagatctccaagacgagtcgtcatgtgggtcaccatcatcatcacaaccactcgcagcaagagttggcctctgggaaacttcccctgcacaatggtcacggtgaacccttgggactggcctcgttggccactcaacctgctcctcccctgccgaatagcaagcagagcagtcccgccaagaccgtcaccctcatagacaatgccaagcccatcgatgccattgaccaggaggatcagcatgtggtcgaggacctcaagaagcagctgcgcgaaaaggatctcgtcctgaccgatattcgcctggaggccttgagctcggcctcccagttggagagcctcaaggagatgatgaacaagatgcgggcggagatgatgtccctgaagcacaacaatgagcgtctccagaagctggtgaccacgcgatccttggctggttcggaggccagcttgggccaggccatcagtcccaatggatcagtggctggaagctctgaggtgtcgaggcgctactccctcgccgacagcaacagtcgcccacccatggaactcccagctcgacttagtgaagaacttgaactggaggaggactgtttgccacctgccccggcccccgaacaaccaccaccaccggcccccaatggcgtcagtgtggcaccccttagtcccagtacccacgtagacctaacgccaccgcctcctgccttggaggcggctcctatggccagtccggtgcacatggccagtgccacggaggagttggccgatgtgtgcgatggcaagaagatagccattgcctgttatctgggtcagccagaggcgtttgccaagtactgtgaggagctgcaggagctcgatggcttctatgccaatggccacgaggcggatagccaatcccaaagcgagaggaagtccaactataccagcgccagctgcaacgagttcgtcatagcctgcacctatatatccggcaagacgacgtggcagaatctggactacgtggtgcgcaagaccttcaaggactacgtggcgcgcattgatccgggcaccaatctgggtctcaacacggactccattacctcgtaccacctaggagaggcgaaacggggtcccgagatgggattcccggaactcctgccctgtggttacatagtgggcagcgtgaggaccctatacatttgcctccagggtgtgggaagtttggctttcgacagccttattccgcgcagcattgtccatcgatacatcagcctgctcacggagcaccgacgtctgattctgtgcggacccagcggcactggaaagtcctatctggcccgtcgactagccgagttcctggtagcccgctctgccaggggcaatccttcggaggccattgccacattcaatgttgaccacaagtcctcgaaggatctgcgacagtatctgggccacattgccgagcaggctgccattgccaatggagtctccgagcttccctctgtgattattttggacaacctgcaccacgcctccgccttgggcgacgtcttctcctgtctcctgagcgctgggcccgccaacaagctgccctgcatcattggcaccatgtcacaggccacttgcaacaccaccaacctgcagctgcaccacaatttccgatgggtgctcacagctaatcacatggagcccgtgaaaggctttctgggtcgcttcctgaggcgtcgactcttccagctggaactgcagacgcaacatccgcagccggagctggcggcagtgctggcctggttgccctccgtttggcagcacatcaaccgattcctggaggtgcacagctccagtgatgtaaccattgggccgaggctattcctcgcctgcccaatggacctgaaggactcgcaggtgtggttcaccgacatctggaactaccacctctcgccatacttggtggaggcggtgcgcgagggagttcagctctatggacgacgaggaggtgcctggaacgacccctccgccttcattaggaactcctatccgtggccatacggtccggactcagtgcctccactacggcaaatcaatgccgaggatgtgggactcgaaggcgtggccctaaccaacggtgaccaacaggatcccttgctcaacatgctgatgcgcctgcaggaggcggccaactactcggaggcccaggatcaggagtccgattgtgccagcctggactcgaatgttacgcccgaaagttccgctggagccgagtga

SEQ ID NO: 42780 - protein, 916 aa, DROSOPHILA
MPSSDTRPQNARHDRDAHVVTAFEQSLSNMTNRLHQLTATAERKDGELTDMRQTIELLRKQSIQAGLTTAHMQSMGVQTQGQGQVQGQALGQALGQPGSDQKPPNSGSQRAINANNGSMPLGMQRQHSTDSMCSLNSISSGCSAAQDKNKANKKKGWLRSSFTKAFSRNAKISKTSRHVGHHHHHNHSQQELASGKLPLHNGHGEPLGLASLATQPAPPLPNSKQSSPAKTVTLIDNAKPIDAIDQEDQHVVEDLKKQLREKDLVLTDIRLEALSSASQLESLKEMMNKMRAEMMSLKHNNERLQKLVTTRSLAGSEASLGQAISPNGSVAGSSEVSRRYSLADSNSRPPMELPARLSEELELEEDCLPPAPAPEQPPPPAPNGVSVAPLSPSTHVDLTPPPPALEAAPMASPVHMASATEELADVCDGKKIAIACYLGQPEAFAKYCEELQELDGFYANGHEADSQSQSERKSNYTSASCNEFVIACTYISGKTTWQNLDYVVRKTFKDYVARIDPGTNLGLNTDSITSYHLGEAKRGPEMGFPELLPCGYIVGSVRTLYICLQGVGSLAFDSLIPRSIVHRYISLLTEHRRLILCGPSGTGKSYLARRLAEFLVARSARGNPSEAIATFNVDHKSSKDLRQYLGHIAEQAAIANGVSELPSVIILDNLHHASALGDVFSCLLSAGPANKLPCIIGTMSQATCNTTNLQLHHNFRWVLTANHMEPVKGFLGRFLRRRLFQLELQTQHPQPELAAVLAWLPSVWQHINRFLEVHSSSDVTIGPRLFLACPMDLKDSQVWFTDIWNYHLSPYLVEAVREGVQLYGRRGGAWNDPSAFIRNSYPWPYGPDSVPPLRQINAEDVGLEGVALTNGDQQDPLLNMLMRLQEAANYSEAQDQESDCASLDSNVTPESSAGAE

SEQ ID NO: 42781 - DNA, 3254 bp, DROSOPHILA
aactgaacctgataacgaagcactaccatcccaaaaagcaaggaccccggctgcgtttccgaaaaacccaaatcttgagaaaaggaaacttcactaacatgaaatgttacagagataagacgagtgaattcatttttgtacatatagatgaaaactaaccccaagtcccccctatgcttaagtgtgaatctgaccgacggtctagactttttataccctttatcccagcccagagtcggcggatcatatgaattaaatcgcaactaatacctaactctactgtaaatgtagctataagtttttgctactaccaatttacaagatgtatagttgaaggaaaaagctttcactttagtttaattatttgcgtaattatcattaaatattgttacaaacatattgcatatttataaagcccaataaagcaaaataccattaacatatttattatgccaagcggcgcttaaacacaggaatacgcgaaagtgaatacgtaatgccccatcctcgataaaatagctaaatttccgaactccagatccctatcgaaagataatcttatgtaatacaaactcaagcagcaaactatatgatacgataaagcaaattatgtgtctctgtctaatttaaatgtgtgcatttatgagatatgacatcaaatcaaaataaaatataatatcgaacaataattgttttgttgttgtttctcttctcgcggacagactacaaaaagaatgtgaaataccaaaccaaatatttcaccatgctgcgaaataaaataaaacataatagttgcccttatttgctgtttctttattttaatatatttagatttaaataccccgccgaattccgattgctagcgattgaatatatcgatatattaatatttatattttttcattcgagatgtggtcacacttctctgcatgaaaataccaaaatatcgagcaataattacccatccatatatatattttgttttgtatattccctctggtcacattgttcagcaagtctaagaaaagtaggtaaaagtgctttaaaaattgtattaattgcgaaaaatatcaagtacctgcgaccacaaagctattgaatacaacgagcgggataagcaagccgacataaattggaaaaccagttgccaccggtttataagccgttttccggtagatgcaaccgcccaccgattacacaacatctgtgatggctgtgaaaaatgggagaattatgcggatattatgccaaacacagcacgaaatcgggataaatatatggcgacaggcgtagaggaacctcaaaacaatgcgatttttatggaaatagattctataacttggcacgtagttctgctagctgttacataacctccaactaagtgggcaccatatatcggtgaattcgtaacccgttagaattcacggatgaccgcctggtcgggtgggaaatttggctatcgcgggtccaagaccctatgttcctctgctgatacctcataaattgatattcattttactaccttgcagactctgtgagaaaatggccctgcgactactcaacagtgctgtgctccgccagctggcctctcagctgcccaagagtgcccaggtgggcagcgtggccgccgtccacacactggacaagatcggcaagcgggagatcgttggctacggctggaacggcaccgcctgctacgcggatcgcgtggactaccctctgcccgccgtgcgcttccgtgagcccaccaacgagatcaacgctctgcgcgccaaggagcagggagactggaagaagctcagcacccaggagatcaaggccctgtaccgcgccagcttctgccagactatcgccgaggtccaggctggatccggggagtggaagctccacctgggcgtttcactcctcttctgcgccgccgccatctgggtggccgtactgatgaacatcttcggtaagccatttttccggttcccttttgcggctatccattattgagcattttcctttcagtgtacgatgagctgcccgttaccttcgatgaggagcaccagaaggcgcagctgcagcgcatcatcgacctggaaatcaaccccgtcaccggattgacctccaagtgggactacgagaacaagaagtggaagaactaagtgcgctgtcgttaaataattccgcgattgtgtgtgattaagttagccgacgtctatgtgtattaagtaaaagcaagatagtcgaaattaaagttatggctgctgcctaaatcaatcgatcttgggtcagtcatcagtttctgctaggaaaccagcctcaatgatccgttttaagagcaatgattgttattcgatttattaacagaccttttagtgtgtagattacaaacttttcgttactaaaatcgccacaggcatagccaatttaattaccacttagtgagaccttttagcactcttatgtctcatgttccggctgttcgatttttgaacctcatgaacaaggatctgcaaggcttccaaggcatttgtgttcttggcaaattccctttcaaacatgcggccgaatcttaagatcaatggtttcagttccggcgttatcattgctttctctttttcggtcctaaaaaggcggatttcaaaggcattgccagacatataggcgaacactacttacacagctcccttttttatcacctctttcaggatctggacaaccgtttgaatgtccccaaataatctgtacttgtctttggtagaaatttcaccgtcaaagaataacttcagttcgttgtcagttatattcttctttcgaccccattcctccagctctgccgtctctttttggtaggcgctccgagctctgctgaaaagaagtcaggcattccttgatctcagagcattcatacttgatgcagatgatgcacctacctccagttcgaaatatccctagctgtctgcttcatcttttttaaatgtcctgatctgtgtttgaaagtcttctcttctttctcctttgcaactgtcgcctttggttcggcatctcggttaaagctattgaaagcgaaaggttggtgccattcgaaagtgtatatatccttcagctcgatcgaatctgtatcttactgtttgtgccaatcgtatccatcgtatggaggcctgtgcagattgtgtgctcggagatgacgctgtctttccatctgggtgtggttctggttacctctgctgtccacctggaggaagagcaacagcaggcaatggagg

SEQ ID NO: 42782 - DNA, 693 bp, DROSOPHILA
tcacattgttcagcaagtctaagaaaaactctgtgagaaaatggccctgcgactactcaacagtgctgtgctccgccagctggcctctcagctgcccaagagtgcccaggtgggcagcgtggccgccgtccacacactggacaagatcggcaagcgggagatcgttggctacggctggaacggcaccgcctgctacgcggatcgcgtggactaccctctgcccgccgtgcgcttccgtgagcccaccaacgagatcaacgctctgcgcgccaaggagcagggagactggaagaagctcagcacccaggagatcaaggccctgtaccgcgccagcttctgccagactatcgccgaggtccaggctggatccggggagtggaagctccacctgggcgtttcactcctcttctgcgccgccgccatctgggtggccgtactgatgaacatcttcgtgtacgatgagctgcccgttaccttcgatgaggagcaccagaaggcgcagctgcagcgcatcatcgacctggaaatcaaccccgtcaccggattgacctccaagtgggactacgagaacaagaagtggaagaactaagtgcgctgtcgttaaataattccgcgattgtgtgtgattaagttagccgacgtctatgtgtattaagtaaaagcaagatagtcgaaattaaagttatggctgct

SEQ ID NO: 42783 - protein, 182 aa, DROSOPHILA
MALRLLNSAVLRQLASQLPKSAQVGSVAAVHTLDKIGKREIVGYGWNGTACYADRVDYPLPAVRFREPTNEINALRAKEQGDWKKLSTQEIKALYRASFCQTIAEVQAGSGEWKLHLGVSLLFCAAAIWVAVLMNIFVYDELPVTFDEEHQKAQLQRIIDLEINPVTGLTSKWDYENKKWKN

SEQ ID NO: 42784 - DNA, 2475 bp, DROSOPHILA
tcagcgctgcccaaggagagactcgagcgcaagaggcagcagctagagaacttggccaatgcggtggtttccctggctcaaccgggcgaccgcattgtggacttctgcagcggcacagggcatttggccatactgctggccctcaagctgccaaattgtaccattattgtgatggaaaacaaagctttctccctgcttcaagctcagaaaagatcaaacgaattgggtttgaccaactgcgttttttaccaatgcaacatagattactttgtcggaggattcaagatcggggcctctttgcacgcgtgtggaacggcgacagatatcgttttgcagcagtgccggagagccaaggcacattttgtttgctgtccttgctgctacggttctctgcagcccatgcctcacatttcgtacccattgagcaaagcgttccaaaaggtgttagacacaaaggactacttgtacattgcccactcggcagatcaggcacacgagatggggacaaccaactgcaagccagaaaccacgcttcaaggactccactgcatgtccgtggtggacaccgatcgcctgctgcaggcggaggaggcgggctaccaggtcattctcacacgcttaaagcccgaacagtgtacgccaaagaatcacctgctagtcggacgttttgttaaacagaactgaacttacaatctgccactgagacaaaataaatgcctttttgatatgttttaaaccttagcccaccattgtggagtgttcttctttttttcgaatgatttagatgttggcttacaaaaaaacatgttttattacggacccggttggccccaatccattctgtctaaattcctccgatgcgaatacactttgttttcttctaaaccacttttaagacttctttttagtttacatatattaattctccatatgacgcttctcaagcttaatatatttgagtgaattttaaatgaatgttttccacttatgaacacgctagttacacacaaggtgttaggattgaatcacctcctcgcagagccaataccaagtgaagaacggatccaccttgcactttgtagtccgccgcggttttatcgtcattcctgggggggatcgcatgcgaaataagctaaaatcaatgaccaatagccagaaagactcacatttgcttgccggagaaaataagacgctgttgctggggcggaatgccttccttttcctccacgcgctccttgatgcgatctaccttgtccgtgggctcaatgtcgatctcgatttccttgccggtcagggtctaatggaaagataatacatatttacattaataatccagccacacatatattgactgtaatattcgacgattttgttgttgttcaaagtgcccgctgggcacgatggctgtgatttatctttatcctacttttttgctactccatatcttccacactaaccttcactttgatcaacattttgtgtgtatttaactaggcgctcctgtacaaattcaaaattgccgaaatttttgcaaatctccacagctggttctcttttttggctgtcactttcggcgttggtacgactggcaactatcgatagtactgtcgatgaccatcgattgttttccacactattacaaatatagtattttctccatcattccatctctacacaattcacgtgtaaaaaaatacatttcgaaaaaggagaacttaatttatgtaaattttttgtagcttgatttatagtgtgcccattacggttagaagtctcacatatttagaattcaaattctccttaaattattttactcatgagatgcaaaaatccattgaatgccattactacattttttaacttttgaaaaaaatggaaggcgtcacttttgagggatttgaattaagagcaatttgtttattaatgttttatctcggatcttagaaaattaaaaagtatttttttgtcttttgtcttttctgttttattaaaataagttgtatgccttaataactaaatacatttatttacagtactaaatggataactactttgttcttttcgaaggtactgagatccccagcttagaagttcatccctatgagagcttcttcagtttgttccagtcgcgaatggcctccccgatgtggcgtatatccctcgcataagtgcgacagcatcccccaatgaccttggcccccagttgcgcccactccggaacgtagttcgccaagggcacacagtgctcccttccctgccagccgttgaccacgtcgtatacctctccgctattggggtacaccaccaacggtatctgctcacccacttcgcggtcaccattcaaactcttaaagagcggggtcacaaacttcggatgcacacaatttactccgatggccaggcacttatcctgggcatttcgttcagccaagaggtcccaaatagcattcgccgcgtccgcaaaggtttctccat

SEQ ID NO: 42785 - DNA, 255 bp, DROSOPHILA
atgttgatcaaagtgaagaccctgaccggcaaggaaatcgagatcgacattgagcccacggacaaggtagatcgcatcaaggagcgcgtggaggaaaaggaaggcattccgccccagcaacagcgtcttattttctccggcaagcaaatgaatgacgataaaaccgcggcggactacaaagtgcaaggtggatccgttcttcacttggtattggctctgcgaggaggtgattcaatcctaacaccttgtgtgtaa

SEQ ID NO: 42786 - protein, 84 aa, DROSOPHILA
MLIKVKTLTGKEIEIDIEPTDKVDRIKERVEEKEGIPPQQQRLIFSGKQMNDDKTAADYKVQGGSVLHLVLALRGGDSILTPCV

SEQ ID NO: 42787 - DNA, 3043 bp, DROSOPHILA
tgggatgatcaaagtatgagctaaacatacaactttgaacaggtctttgagcacgccctgggtgaagtttggaaactaaatagttgtccgcgtaatcctcgcctgctggcctccgtctacaatgtacaaaagggagcacaagtgctgaccaaagcggctctgtttacgctgcccgagaatctcaatcccgatccggagcagctgaagtcagagtacctgccgtgggagcaggttgaggtcctggataccgaagcactgggcgaacgtgtgaagaccatcgaattccatcccaaccaggacacactcgcctgtgtggtggacaacaaggtggctgtgatgcagcgggccgagtcctctactcgcgtggtggccgaggtgccggccagtggttcatccagtggatctgcaaagcacacacagcatttcaccagcggcaagtggtcgcatcatcatcagggccaccagtttctcaccctccaggatggcaatctaagtgcctacgatgtgcgggatacacagcattgtgcctggagcatcaacgatgcgcatggtcaaatggtccgtgacctggactgcaatcccaacaagcagtgccatttggtcaccggcggtgacgatggctacttgaggatctgggactgtcgcatgcccaaggctcccgttttcgagcgctccgatcattcgcattgggtctggtgcgttcgcttcaacacattccacgaccaactgatcctctccagctccagtgactgcaaggtgctgctcacgtgtgcgggatcggttagttcggagacgcaggttcaggctggactagatgagtccaacttcagtggtgccgatgccgaggagaggcacaaactcttgccagatggtctgctgcagaccttcgatcagcacgaggactccgtttactgcgcggagtggagcaatgtggatccgtggatctttgcttcgctcagctacgatggtcgcgtcataatctcaaaggtgcccaagcagtacaagtaccagattatattttaagccattagtttcttaaattattacgcatatttcatttaaatctaactaaacgaattgtgtccttgtatgtagtagcaggttatacaaatattaaaccaataagttattatatgaagataaatatatcgagggactaaagctaattaggcttaacctgtatcctcggatgtgcagtcggaggaatcattgggattggcagtttccacggaacaaactcgcttgatcagctcgttttcgatctccacagtgccattgtccactgcctcctccatctgcacgtactctatggtggcggcacttttcttggtggataggacaggttttgcggcagcaggagcaggtgtttctgcagtctttttagcctgggcttccgtatcatcctcggcttcctcagccaaactgctacgctgcggctgaacttcggcgtaaatggcgggaaactgcgactgtagcttctgcttgatgatccgtatcttgcggaatatgtaatccagatccttcttcatttcgctcaggcatttcacgtgtcttttgaaatcctcgctggcacttttcaaacgactctgcgataaggcattgcagttgagcagcatctcgttggttttctcaaagcgttgcagcctgtgggatatattttggatgtttattataatctctggttaaatgaaatggcttacatttgcttttgagcccgtatcatggtctccacatcgccctgattcaccattcctgcgagactttgaatgaaggcctcggcggcggagttgccgaagccagtgaaggattccaggtcaggagtggcatcctcggactggtgcacatccgcaaggcccaagtggctcattgtagcctagaatttatttgtttataataagggagaacacaaaaattgatttgtttacttgcttttcaaggtctcaaggtttctttgcgacaacttgaactctgctttgtgtgcgtttgctggcagttttagttttttctatttttatttacgttttcaaatggatctcatgtttccatctattttaaaagttcttttgtttagatttcttaaaaaaaaagatattttcgtaacagctgtttaagtactagttataaaccagtgctgcaagctgccaaaatgcaaaagcactgccgtaattaaatttgaacattttactttttaacataaaattaacactgttttatgacaacatttgttcctatttaatataaatcaaagtttctttagctatttaaacacttaaaaatatttaaataataaagcttagcagaatggcattgggtatttttacgcaaagccgttttggtcacactatgctcaccggctttttttttattaagcgattgaatttccttatttattcttgatttaaacgtgcaaaatgaagctcgctccgactgttaagctaaacaatggctacgagatgccaattctgggcctaggaacctacaatgtaagtccttatcatcggcgatgctaataaatcagcaggcagaaattgtttatggaaatttctaccattcaattccaattaagtgcaattgtgaaattgaaagttaattatgttatctgtagttaaagaagtctcgctgtgaggctgccgtgtgccacgccctcgaaatgggctatcggcatatagacaccgcatatctgtacaggaatgaaggcattataggcaaggttttagctaaacttattggcgaccagaaactgaaacgcgaacaggtgtttctggtcacaaaggtaggatatagtacagatgggttatatatagttaccagcacatgtaaatagatcgaaaatcaatatccaattagctgtgggacatataccacgaacccaagatggtgaaatacgcctgtgatatgcaattaaagctactgggcgtggactatatagatctatatctgatgcattcgccggtgggcgtggactacatctctgatgaagatctgatgccccacgagaatggccagctgaggaccaagtgagtttgggatacaactaaacata

SEQ ID NO: 42788 - DNA, 931 bp, DROSOPHILA
gaaacatgagatccatttgaaaacgtaaataaaaatagaaaaaactaaaactgccagcaaacgcacacaaagcagagttcaagttgtcgcaaagaaaccttgagaccttgaaaagctacaatgagccacttgggccttgcggatgtgcaccagtccgaggatgccactcctgacctggaatccttcactggcttcggcaactccgccgccgaggccttcattcaaagtctcgcaggaatggtgaatcagggcgatgtggagaccatgatacgggctcaaaagcaaatgctgcaacgctttgagaaaaccaacgagatgctgctcaactgcaatgccttatcgcagagtcgtttgaaaagtgccagcgaggatttcaaaagacacgtgaaatgcctgagcgaaatgaagaaggatctggattacatattccgcaagatacggatcatcaagcagaagctacagtcgcagtttcccgccatttacgccgaagttcagccgcagcgtagcagtttggctgaggaagccgaggatgatacggaagcccaggctaaaaagactgcagaaacacctgctcctgctgccgcaaaacctgtcctatccaccaagaaaagtgccgccaccatagagtacgtgcagatggaggaggcagtggacaatggcactgtggagatcgaaaacgagctgatcaagcgagtttgttccgtggaaactgccaatcccaatgattcctccgactgcacatccgaggatacaggttaagcctaattagctttagtccctcgatatatttatcttcatataataacttattggtttaatatttgtataacctgctactacatacaaggacacaattcgtttagttagatttaaatgaaatatgcgtaataatttaagaaactaatggcttaaaatataatctggtacttgt

SEQ ID NO: 42789 - protein, 212 aa, DROSOPHILA
MSHLGLADVHQSEDATPDLESFTGFGNSAAEAFIQSLAGMVNQGDVETMIRAQKQMLQRFEKTNEMLLNCNALSQSRLKSASEDFKRHVKCLSEMKKDLDYIFRKIRIIKQKLQSQFPAIYAEVQPQRSSLAEEAEDDTEAQAKKTAETPAPAAAKPVLSTKKSAATIEYVQMEEAVDNGTVEIENELIKRVCSVETANPNDSSDCTSEDTG

SEQ ID NO: 42790 - DNA, 2603 bp, DROSOPHILA
agtctcaaatatcacatgagaaggacgcacgaaaggtatcacgagtcagagtccccggatgcgcggcacatttgtgaggagtgtggcaagtgctttgcgcgaaaggcacatctaacgcgccacaagatggtccatggtagcgttgagggtcggagatactgctgcgaatgctgcgatcgcagattctacaccaaggagaacatggtggatcatctgctgcgcaagcacggcaataagaatctgctgctcagatgcagaaaatgcggacgcattttccagaacagcgtggagctcaacgctcacgggaggaaacacaaagcgatggatgtagttcaataattcgttttatttgtggtttcaataacatcaagctaacacaactgttacaatgattcgaattacttggaattttgttatgccagtattgtgggagaatgccgcataattggagatactaagacgacgcgaatggttgacgaatcgatgaggctgccctaaaattagctaacattcacataatggccggcgcagcagcatagtcgcttaaaaatcatcagtacaaaaaaatggcgatggcgatggcgcgcactcgcagtagttctcaaaaaagtaatcatgcgtatataaaacaattaactaaaatttatccttaagcttaaagaacggatgacagttttaaaattacattaccaatacattcatttatcattaatttgtagggaggaggaaagaaatgagaataaaaaccagattatccgtcaatcgatcgacaattacataagaaacgcacggggtcttttgccaaatgaactatcagcattgaacgttgttgaaattgatctggtgatccacttaactgatggtactgtgttacggtggtgattgatgattggtttgttggttggcagtaggtcttcggatgagtggagttgcttgcactatatgtaaataaatacgccgcaatatgagcataggatatatgacaacgaattgccaaactctaggtgtccttgtgcttctcgtagaaggcgtctagatattttttgtactccttttggtcattccacatcatcgcggcctgcgcattcagtggactctcgttgttcggttcgcccagcagggattgtatggacagcagaatggtgcgcacatcgtacagggccgaccatttgtccttcagtatgtccaaacagatggcgccctgcagatcaacattgggatggaagcaggacgtcaggaacttcaccacgggtgctgcatacggataggaattgggaaaatccagtgacaaacgatacgtttgccccgaatacaccgtgttccgtggacccgctatggtgcccacccacttgaagatgttctcgccgtccggaaacgctgagatgcccctctcgttggccatcatcaggttcatcagttccttgtgcagtctgtgggtgagtgtgagtgtgtgtgtatattggcggattatctaggctgcaccatgtgctactcaccttttgctcacggcgtgattgtctttcacgggcatggagtcatcgctgtgcttgctgccgccgccgcctgctccaccactttgctcggggctgatattctgcgccatgactatatatctacgtctatatatgtaggatgctagtgctatccgctgtttggctttcagtatgtgcgtgtaatttagcgcgcttcgtggcggtcgggttttcgattctcaattgtgattatatgtactgtatagtggaaatttagtttgatcggtcggaatacgcgtctgttgctttttcagatattttttttttcacttttgtgtgaaaacaaaatggaaggagaacgagaagaaactgtgtttgggcacagggttgtatttcatttatttttggggggagtcgatacgctctcttggcgtggtcgaacggtcacactggccgagagataacggaaaatgtttcaaaggtaagtaaagattataaacgtattaagcttaatactataattagcttactattccaagtatgtataattattacacgtttaaaaggcataacgttaagtgtaaccaaattatatcaatggattttgaataccaatattatttattttatattttgagcttaatatattaaatcacatatatttaagcctctttatatatgtaaatattttaattttattaaaataaattatatattgttttgtaatatgatcgagggctgccaccttgtgataaatgcttaccaacacttttaggtacgccgtttagtgtacgtaagttgcgtacctagatatccagcgaaatcaaaacattgagtaaatcgtggaaaatggatgaaaatagcttaatctacggactcgaactgcaggcgcgggctttaacacctcagtacggagagagcaacgatgtgtgcttcttcatagccaccaactccttgaagcccaccaatcaggttcacttaatccagtacgaggaggagcagggatccgtgcaatcaaaggtgaatatctgggatgatcaaagtatgagctaaacatacaactttgaacaggtctttgagcacgccctgggtgaagtttggaaactaaatagttgtccgcgtaatcctcgc

SEQ ID NO: 42791 - DNA, 537 bp, DROSOPHILA
atggcgcagaatatcagccccgagcaaagtggtggagcaggcggcggcggcagcaagcacagcgatgactccatgcccgtgaaagacaatcacgccgtgagcaaaagactgcacaaggaactgatgaacctgatgatggccaacgagaggggcatctcagcgtttccggacggcgagaacatcttcaagtgggtgggcaccatagcgggtccacggaacacggtgtattcggggcaaacgtatcgtttgtcactggattttcccaattcctatccgtatgcagcacccgtggtgaagttcctgacgtcctgcttccatcccaatgttgatctgcagggcgccatctgtttggacatactgaaggacaaatggtcggccctgtacgatgtgcgcaccattctgctgtccatacaatccctgctgggcgaaccgaacaacgagagtccactgaatgcgcaggccgcgatgatgtggaatgaccaaaaggagtacaaaaaatatctagacgccttctacgagaagcacaaggacacctag

SEQ ID NO: 42792 - protein, 178 aa, DROSOPHILA
MAQNISPEQSGGAGGGGSKHSDDSMPVKDNHAVSKRLHKELMNLMMANERGISAFPDGENIFKWVGTIAGPRNTVYSGQTYRLSLDFPNSYPYAAPVVKFLTSCFHPNVDLQGAICLDILKDKWSALYDVRTILLSIQSLLGEPNNESPLNAQAAMMWNDQKEYKKYLDAFYEKHKDT

SEQ ID NO: 42793 - DNA, 3507 bp, DROSOPHILA
atttgaaaatgaatcgattggcagaaccgatttcttgagaacgtgctatcgatacaattagttgtttagtgatcttaacttaactcctcgctatcggaaaatctggacaaattataaaatttctaaaactagaaattatccatgagacgttatgtaacatttcatattcttgcaacaacattcttcacaatacttttatacttaacaagaaaatgttcaaataaagtttttagagtaagtcgatctccgatacataattgtgcacatcttgagttttcccatcccttgttgtctttcgagcgagctggcagtgctgactcagtataactgactaactaatcgcctaacttgcgcgcgatcatgtcccagaaatccatcgatttgggcttgggtgtccgaaacgtcaaggagaaatcttcggaatacatagtggagaagtttctaggaaagcgctatctgcgtggacgccctcagtatctgaccaagtgggagggctatcccatagagcagtgcacttgggagcccctggagaacttgggcaagtgcatgacgctgattgcggattacgaggccgaactattccagcagagccgggagaaaaagaatgaccaatgacaaaaaaaagattttaataaaaattattgcttacaaataaaagcttaatagatcgtgttcccattatttaatggcttttattttattatacatatgtatatttcaataaaatataaccagggctgcaaaaacgttgctgagaagcgccaggcttttcatacggttatcatgttaagattatttgcgagctaatttattaagcagagtcaaataaattagcttaatttatttgttgcttattgaagtcttatagtgagttatgcacattaaaaaaataccaaaagctttcccatccctaatagtattccgagtgggttagcagcacctccttgcgcgtcgttccatttaccgttcttttgctcggcgtcctgtgagcggataagttatgtctcgcaaccatcagcgaccaaatcttggtctggtcgatgcaccgcctaatgatcatgtcgaagaatatgtagtggagaaaatcttaggcaaacggtttgttaatgggcgtccccaggttctggtgaagtggagcggttttccgaacgagaacaacacctgggaaccattggaaaacgtaggcaactgcatgaagctggtctccgacttcgagtcggaggtcttcaggctgcatcggaaggccgcggctaaatctgtcgggaaatcgaagtcaagtcctagcagcagcggtccattgatcaccgagaatggccccagcagctctaagaaaacacaacaacattccaagtcggtgcaggcaaaaaacacagctggaatgtcgaagatgaatcagaaaaaaggaaagaatattaagaaaacggcgggaaaaatcaaagatattgaaaattatcccaaaactcagatgcctagtactagccaagtctccacagattcaactgaagttttcgacggcaatccatcagccacaacgacgaacatgattaagagtcccaggattcaaagccttttcagtgatctgaacttgatcgaacccactaaagacaaagatgtgggggacacatctttaaaaacgcctcccaaatcgcgccggcttattgaatttcctcaacgggaagacgcaccattgtcttcgaaacatgtgtctcctatgctgattcgtaaagaatcccaaccattgcagagctcatgtactgatgattcggatttgggtgaatcctcttccagtatgtcgcttcctacagtatcatcgaccagctctgagaaatcgatcaaggtcaccaaatcggaacctaaaacgctcggccagataaagttttcgtctaggtcatccgatggtggtcatgcggcttcatcgctgggcgcaccaaaagaaggggacattggcttggatttatctggcagtgattccatggattccgaagtggagagcgtaagaactgttctttccaattaagaaaatcaaaccaaagctagtaaaaatatgtttataatcatttaaaccattaaaaaaaaacctaaatgtaaaagcgtttgaatagaaacctttaaaagttaatcagcttaagcctaattcctacctatcaggcttaagtaatgaatcaaaagtttctttagcaatgatttgattttcttgtccattaaaacaacacacctaagaaaaatgaattgtattggaacagatgcgccgctgtccgcgccgcaagcgtaaaaaaacttacccggattggaaattcccggagatgacgaaacccttcggtgtgaatcgcggactggatctggataaaattctccactgctaccagatgaatgacgatctattcatgtttgtcacgtggaagggctgctcgtccatcgatgcagtgcatattaatgacattaaggaagcgtatccattgcagataattaagtacttcgagagcttgaggatcattgtgcccaagtaaagatgcctagtaccgggtgagttgtggcagcagttcattttggccctgtgcccataaccttaaacgcaagcatccgctcccgagcagcttcagtttcttcttcataactttacagttcgacgctcgcaatatttgagccatgagccatgaaaacttcacgttgccttcgggtcaagataaatgccatcgaaaaacaaaaacagacactgaaacgaaaacgagccatcatccggtcggcggatccactcgtttgattcgtttccctgtgcattgcacctgtatctgcgtttttctcttctctgcttggtaaaccattgataattcccgtgtcacccatatgacaaattgcttgcccatatcgtggtgcacttagtacatagttctttgaagattcatgactttacctgtgcaaatttatgagtaggtctttgggaaaaatttaagatgtcttcatagcgttaacaagactctattattggcacacgtgtgttttcgaacatgcttattgccgtctactcttttcgtaatttgtagatttctggctcgagatcagccagcgaaaattatgaggctccagactctgggttttcggtttccatttggcttatctgtcgcatctgttgacagctgctttgctttgaactcgtcggcttggcaacacataccgccggacagatcggaccaactccctcgcaaaagttgtgggcgtttaagcgtctacgcggttcattcaacctatgtggagtcacagaatgaagtcaccaacctaaattgtgattctgtacagatgcagtttgttgccttaatggcgtatctcatagctttaaccttcaatcgcaaacaagtacttagttgtatcatactgtactccaactagtgttgctgaggtgacacgcacagctggagaggcgacacacctttgtggggcaaacgatagcgccaccaagtggacccgccggctaatggactaatgtgtccatttagtgagctgcctttcgca

SEQ ID NO: 42794 - DNA, 1257 bp, DROSOPHILA
atgtctcgcaaccatcagcgaccaaatcttggtctggtcgatgcaccgcctaatgatcatgtcgaagaatatgtagtggagaaaatcttaggcaaacggtttgttaatgggcgtccccaggttctggtgaagtggagcggttttccgaacgagaacaacacctgggaaccattggaaaacgtaggcaactgcatgaagctggtctccgacttcgagtcggaggtcttcaggctgcatcggaaggccgcggctaaatctgtcgggaaatcgaagtcaagtcctagcagcagcggtccattgatcaccgagaatggccccagcagctctaagaaaacacaacaacattccaagtcggtgcaggcaaaaaacacagctggaatgtcgaagatgaatcagaaaaaaggaaagaatattaagaaaacggcgggaaaaatcaaagatattgaaaattatcccaaaactcagatgcctagtactagccaagtctccacagattcaactgaagttttcgacggcaatccatcagccacaacgacgaacatgattaagagtcccaggattcaaagccttttcagtgatctgaacttgatcgaacccactaaagacaaagatgtgggggacacatctttaaaaacgcctcccaaatcgcgccggcttattgaatttcctcaacgggaagacgcaccattgtcttcgaaacatgtgtctcctatgctgattcgtaaagaatcccaaccattgcagagctcatgtactgatgattcggatttgggtgaatcctcttccagtatgtcgcttcctacagtatcatcgaccagctctgagaaatcgatcaaggtcaccaaatcggaacctaaaacgctcggccagataaagttttcgtctaggtcatccgatggtggtcatgcggcttcatcgctgggcgcaccaaaagaaggggacattggcttggatttatctggcagtgattccatggattccgaagtggagagcatgcgccgctgtccgcgccgcaagcgtaaaaaaacttacccggattggaaattcccggagatgacgaaacccttcggtgtgaatcgcggactggatctggataaaattctccactgctaccagatgaatgacgatctattcatgtttgtcacgtggaagggctgctcgtccatcgatgcagtgcatattaatgacattaaggaagcgtatccattgcagataattaagtacttcgagagcttgaggatcattgtgcccaagtaa

SEQ ID NO: 42795 - protein, 418 aa, DROSOPHILA
MSRNHQRPNLGLVDAPPNDHVEEYVVEKILGKRFVNGRPQVLVKWSGFPNENNTWEPLENVGNCMKLVSDFESEVFRLHRKAAAKSVGKSKSSPSSSGPLITENGPSSSKKTQQHSKSVQAKNTAGMSKMNQKKGKNIKKTAGKIKDIENYPKTQMPSTSQVSTDSTEVFDGNPSATTTNMIKSPRIQSLFSDLNLIEPTKDKDVGDTSLKTPPKSRRLIEFPQREDAPLSSKHVSPMLIRKESQPLQSSCTDDSDLGESSSSMSLPTVSSTSSEKSIKVTKSEPKTLGQIKFSSRSSDGGHAASSLGAPKEGDIGLDLSGSDSMDSEVESMRRCPRRKRKKTYPDWKFPEMTKPFGVNRGLDLDKILHCYQMNDDLFMFVTWKGCSSIDAVHINDIKEAYPLQIIKYFESLRIIVPK

SEQ ID NO: 42796 - DNA, 2630 bp, DROSOPHILA
agatggtgctggcccagttttgttgctggctgggattgtggttgtgtgtggcaggcggtgcgcgtgggtggcggaggtgctccacttacgtctcgtactgcttgttggctactttctccatgctcatcctggcaattatgatgctgactggtagctgatactggtgctctcctgctgactgcttggctgttcctgtggcgctgttccaacctctggaacgagtacctgtggatccgggtgtttgcactactagattctttatgctgctgcttcttctggcgcaattcttcttttgctccttggctgcgcgtgtgtgtgttgtgtgtgtgtgtgtgtgtgggcaaatgggtttttggtggattctcttatgggcgattttttggggcagccgctttttcggggagcggttcgctacgggtccgccgctctctctggtaaacaatcgtatttcctgtgccttatcctttccggttatcagtgggtttgcttattttttggccgtttagttttggttcgctcgactttagtttgacgtttctttttgtacacaacacaacatgcgtccgattaagttccacttgctatccacattccacgcggcgctgtcaaaatcgaccagtgctgtaggtcgaagaagaattttgacattggccagcactgcacgtagtgcagttacataccctactgaagtgggtatatatgtttcattaatttcattaatttttcaactcgagttaaattgattaatttccgttgtttgttagggaaattaagtgactcaaataccaacatttatttcaactccaataattataaaaatttactttataatgtaatcaataataaaatgaataattacataaatagtaaacatatattccaaaatattttttaagaatgcagcaacaccgctgacacaacataccccacatttggttacagggtatcagagtatcgaatttttgctgtcattcttcaaaaatcagtttgtttacgttcacctgcaagccgcataatgggaaaaagtgagaaaaaatcaaagaaaaagcataaggagaagcgcagggaacacaaggaaaagcacaagtcaaagaaatccaagaaacacaaccgaaaaaaggaagaatctccgccgatagcttcaccaacaccaatacagcctgaaagggtcaaccaggaggaggaggatgactttgccataccaataggtccgtaagagcccccctgtatatatttattattgctgaacactctaaacccaccccaaaacccaagcactgatgaatagcaaatcacatgccccggaaactccagaggaataccagcgccgtcagagccagatccgcaaagaggtggacccggtgacgggtcgcgtccggctcatcaaaggcgacagtgaggtgctggaagagattgtgaccaaagagcgccacctggagatcaacaagaaggccacccgcggtgatggagagttctacgaagccagatctctggacgccgccaagcgtcgcaaatagctaatttaccaaaaatgcaaaaatataataagctatttcatgacttgtagtaataattaataactgtcagtttaattaaacaaagggctagctagcgactatatgtacacgcgaaatccgtggaaatttctttggtggcgcagctagtacaactgatggaagaaggtagtgctgccgtcctgccaggcgggatcatcgctaaccttcgccctgcacatcggacaggtctgttcgcgcttgaaccaggtctggacgcactcatcacagaaaatgtggccgcactccaacacagtgggtgtgttgaaggcgtcatggcagattggacacagggcacccgcagcatccagctcgtctttggtcggcggccgctcagagtccttgaataaatgtgtattagaaatgtgtacataacaatcaagtctcaggcattcatacaatattttttctgaaggtcacaatggctttctttagcgacttgccgcgctccaccagctcaaatatcttggcacccaggtacattgcggaaaagagtcctccggaaaccacctccaggccggagtaggactcgtatagaaataggagccactgggtaatgggtgtcattgcccggtagaactgcgaaatgtactccaccaacacataaagcctagcctgaaatgcgaaatcaatgtatataaatggaaatgtatattacaaatgggactttccattttccatttgataatgtaagctcttaattaaattgaaattatgaatatttttgagttgttaatgcatgaactaagatttcatcattagcgttaattttatgctttggcattgggaatttatcgcacattgatccctgtggaaaggaattactcacccgcactttaagtctcatcaagtggtgcggcagcatggtaataataagtttgaccagcattgtcagcagtttgataatgagatcgctcacagcaatgtagtacagcaacatgcccagtgggatcacatttagagatttgtacgtatctttgtacatgttggtcttgatgggttcggacgatgttgtggggctgtcgccttccgagctagtgtgaaaaggcagcgctgtgacctctatgaaaacggatt

SEQ ID NO: 42797 - DNA, 554 bp, DROSOPHILA
cctgcaagccgcataatgggaaaaagtgagaaaaaatcaaagaaaaagcataaggagaagcgcagggaacacaaggaaaagcacaagtcaaagaaatccaagaaacacaaccgaaaaaaggaagaatctccgccgatagcttcaccaacaccaatacagcctgaaagggtcaaccaggaggaggaggatgactttgccataccaataggtcccaaatcacatgccccggaaactccagaggaataccagcgccgtcagagccagatccgcaaagaggtggacccggtgacgggtcgcgtccggctcatcaaaggcgacagtgaggtgctggaagagattgtgaccaaagagcgccacctggagatcaacaagaaggccacccgcggtgatggagagttctacgaagccagatctctggacgccgccaagcgtcgcaaatagctaatttaccaaaaatgcaaaaatataataagctatttcatgacttgtagtaataattaataactgtcagtttaattaaacaaagggctagctagcgactatatgtacacgcg

SEQ ID NO: 42798 - protein, 141 aa, DROSOPHILA
MGKSEKKSKKKHKEKRREHKEKHKSKKSKKHNRKKEESPPIASPTPIQPERVNQEEEDDFAIPIGPKSHAPETPEEYQRRQSQIRKEVDPVTGRVRLIKGDSEVLEEIVTKERHLEINKKATRGDGEFYEARSLDAAKRRK

SEQ ID NO: 42799 - DNA, 6003 bp, DROSOPHILA
tcgggagacttcattcattcattgcagctgagctggattgactttttacaattgtgcttttgatagaagcgcgtagctgccgattttattttctttttttcatgtttaaaatgctcttaaataatagttgttttaaatgctagtaaaacgggtcgagcgtttgtcgatgttttacgcccacaagaaatacaatattacaatcgatttgttactctttcattcaaataaaaacgtattaagttagcttttattttagatttgggaattccatggatttaattggtttactccattaatttcattattgttgttatcggctcctccgccaaatctccttgctcctctccttgctaaatggttgctttcgttttgttttgttttttgtagcttttcatacttatgcttaactatgttcttactaaatatatgtatgtatgctggcgtgccattatctgctccttcttatcaatgccgtgctttttgctcagcgcaaggcgttggaaccagccatttacacaaagcctaacacatggccggttcggttcggttcggttcggttcacattcacattcacattcgcgctagtcgctaatcattaatcgaatcgtagagcgcttatcatcgccaagcacacggtggtggtgggcgggcagcagcggagtgcgccccaggacgtcgtgagaattgtaacactaatttaattatacaaatatattatgccgctggatccataactcgaaattcctgataataagagcctgtgtgtcgtcgatcgttcgggtcacttgattggtttgcttcgaataattagctttgcaatgaataggatatttactttacgctcttctcaattcgcatctatcaatttgtggtttgttggttgtggttggtgtatatttaaagtggctttccactggccgggcggcactattgtgctgcaaaagtaaacagacacacatgtaaacaaacatgttgcaaatgaagtgcttagatgtaattgctactcacaaactgccgccacctgttgcgtctgctctggcaagagggacgtcgactttgtcgtcgcggttgtggcatttggtgcactggagtccgtggcattggatccgtggccagcagcattgttggccgccttcagcgcagcagccgtgttgccattggtgatgtttggcattccgtttccgccacgaccgccgccgttgttgcgattgttgctcctgtttcggaagtttccgccgccgccacccatgcgataattgttcctgttgtagcctggcgctcctccatatcccgagttaatgccgccgttgccattattgttgtagtattggttgcgtccgcggtaactgcttggaatacattcagttgatgagccacactgcatttgcttgattgcttcgattggacttacctgccacgtcgtgtggaggacactccgaaggtctccgtgttcaacttgcgctcctggcgccaatcgttcttcttgttcttgctgcgatcctgggcagcctcgcacgagatgttgtcgaagaacgatttggtcttgtcgtagcacacagcaacatcatcctcctcaggctcgtgctctccagcgccggtctcgttgccagaatcatccttcttgtcggtctcgccattcagctgcaagcagatgatgcaaatagtgagtaactcttaaaacgatcgtatagaaaatgttacttaaactgaacttaaacaagcaataaataaagaagaagatttaccttatttgttaataaactgctcttattcatttagaactaatttgtagtgtataaaaataaaaagtgtatgtggacttactgtgtgaacgccttcaaccttctcacccacctgctcattggttgcagttgcagtggcggccgttgcattggtggctggcttgggtgcaccatcctcggccaccttgagcttggccagttgggagcgcagttcctcgaacttgttgtttgcctgctcgaaatcgaagtcgccctcgaacttgatcttgttccgcggcttgttctgattattggccgactgcggacgatagccctgcaaaatgtgaaagccagggtttaataaaccatctatagcagtgtgagtcaccagcaggtgtacctgattgggtcgcatggggccgcgggatcccatgccgcggttgcgcatgttcatcatgttgttcgagttctggttgccgcgatgcatgttccaggccgggttgtttccacctccgtttccaccgccgccgccgctgccgccgtttcctcctcgctgctgctgttgcattccgttgccgccgccgcgattgcgctgattattattattgttgttgtagttgttgctatagttgttgtccatttgacgtccggagtcccgacgatcccgctgctggttatagaagtccgttccactgccgccgcctcgttgctgctgctgctgcatattgttgtggctgggtccgccacgttgctgatgctgctgattctgttgctgctggtggttctggcgcttatgtcctgcatcgcgtccgttgccaccctggccagcgttctgttgctggtgcagctgctgctgctgagtcagctccgccgtgggactcacaatcaggctaatgggcgtcgtcgatcgcgaggcaccggccagcatgtctagaacggaaactgtacacatatagaggacgcaacgaggacgaaagtaaaggagagagtaatgcgtgtgggcaccaaaaacattagtccaaacaaatacttgtgtcaaatactttgtatcaaaaggtgacattaactattttaaagggctgagtaaaagagcgtaatttttaagcatttaaatcgacatgctcgcttatcggataaagccacaaaatgaaccatatcttaaactattcccggaatttgcgtttttgaaaatagcaatcgctttttagcaggaaacgaattttgatttaagatcacaaatgagaagttctacttgtgtgcaatgtaattttagtaatgtgtggtctacaccaactcacttggctgtttctgctgctggggcttcggttgctgctgattgccaccgatgtgcatgaagggtccgctgcccggagcaccggaaccgggtgcaagcgatccgcccgcattgcccaccatgttggccagattgggaccgccgaggttgccgaacggattgccattgccgtagccgggtccgccgccgccaggagctcctgctccaccagcaccaccactgcctccaccgcttggcatttggggcggttgctgcgacggcacctgttgctgctgcggcggaccgctcatcccgctgggcatggggaagtgctgcggcatctggggcggtccgttctggagctgcgcctgcatgatcgccgggtcattgtggtgcggcagcgtgtggttgttgacaacgcgaatgtccttgatgtccgagccacggaataggatgtagtcgtagatctgcgattgcggcgctatctggaactgggtgtcccgatcttctgtaccgaaggatcgcactgaaaaagaaaagagggttaaaatgaattgagttataatattaaatcgtataaagagtacaatagtgaacattttttccgtaaagttttcttatcccagccgccatttttattccattgctttaagaaagatctttcacaaaactaaacttttaaatttttaaatttttccattgcaaataagctaccttttttgcttaaccggtattctaagtcggtttttaaaagtgctccatctaataagtggaactttccgagcccacatctttcaagtttatattccaattgttttaaaatgaatgcaccgcattatataatgcaattgttcaaaagacgaattacttggattgcggcaaacttgtaaacccattaaggttaggccgcgcttccaatttaacctcaactggggaacgcatgttttgccggtatttctccgctctccgttcctccttttcgacttccagggcactgacatccgtaacgggagcccttggatcccgttatctggcgccaaatcgaaattgtatttgcaaataaacaaattgcattggggccttgctggtgctcgttactttgtgcgcgggtgtatgtgtgccaagtaaattgcaaaagcaacactgtacaacaacaaccaaagacaaaaacaggccaaagccaacatgacaaacaaaaagcataagtgggagagcgagagacggctgtcgaaatgggtaatggagagagcggtggcggcaattgcactcaccgtctccacgagtatgaaattactgtaaaaactaacaaaaagaaacgaaccaaaaggaaagaaagagtagagccaccaacacaagagaaatggacagaatccattttcttttgcgatgaaccgtttttttacacgattttttttttctttttttttggcgcagattacggcacccacatatgtatatcccgtatatgtacatatatgggcgacgtgggcgattttcgtattaaatacttaccactcgagagcgcaatggtgcactcctgcggatccaccgtgtacaggcggccctcgtatcgaatgtccgccttggaaatgaggctgattttggagcccaactccggtaatcccccgctcatcttgaactacttcgatgcttcactgcgcactcacgccgaaaatacaaactattattaaatgtttctgccaacaggcacacgaatttctctgtcaaaagcaaacaattatagcgagcgcgacgacaacgatttctcgacggtttcagtctctgctcttttactttttttccgtctttttttcacacgcaattgcgttccagttccagggcgaatttgcggccaatcgccttctagccgcgtttgctttatcaagctgtgtttttgcacaagtgcgacaagcgcttttccaatgtctgtgatgctgcacacacggctccaaatgtgaaaattgcaattttcgatgcacaaatctttgctccgtccgtctgcgaaaacctacccgtcgaaaatgaacgatgcatacgagcgagagcctcgacggtgttggaaagcgcggttgtatagcagcggcggcggcagcgaaataataataataactgtttatgtgcaaaactgtgcaaaatataaaaggggacgcttcaaaaggttgccaaaagtaaataagactatttcattatttatccgttctctgtttgcattaaaattcaaattttatcctctttcacagggcagccctacttgcaaccctaaatacaactctggaaagtgagcacgcatccctggctcttcggcttccctcggcgcatttttttcaaagcgaaacggcagaaaaatgctctggcattttacggatttctaattgtattatttatgtgagaaaattgcaaataaaagtgagtccatcatgccacccaagatggagccgattagcgtgcgcaccgcgcgtctgaacaacctgattctgggcaaaggagctggcgtctgtgcgaagcccgctggaagcgcctccggatcaggtattcccgcctccaccaggagaagcattgtacccgtgagcaccactagcgccgccgtggccgaggccatctgccgcgagggactcctggacgccttctgtctgctgtacaacgagtgcgacaaggatacgctgaagaagcgcgatcgcaacatcgccgagtttgtcaacaaatgtgagtcaactgcattggtcagcagggttttcggatggagtatctaccattctatagaaatggaactcagaagccacatttttacttcctcgggtcagagaatctacttttgctaatcatattccattattaaagcccacaaaattattgggagtagaatctcttatagatttacctgtatgttccggtttccctccttgaaaatagagctcatgcctagttacccattatattactatctaatttcctactccagttcgtcccatcatagaggagacccgcaaactcagggtcaacgcagatgac

SEQ ID NO: 42800 - DNA, 2335 bp, DROSOPHILA
ggttttcgcagacggacggagcaaagatttgtgcatcgaaaattgcaattttcacatttggagccgtgtgtgcagcatcacagacattggaaaagcgcttgtcgcacttgtgcaaaaacacagcttgataaagcaaacgcggctagaaggcgattggccgcaaattcgccctggaactggaacgcaattgcgtgtgaaaaaaagacggaaaaaaagtaaaagagcagagactgaaaccgtcgagaaatcgttgtcgtcgcgctcgctataattgtttgcttttgacagagaaattcgtgtgcctgttggcagaaacatttaataatagtttgtattttcggcgtgagtgcgcagtgaagcatcgaagtagttcaagatgagcgggggattaccggagttgggctccaaaatcagcctcatttccaaggcggacattcgatacgagggccgcctgtacacggtggatccgcaggagtgcaccattgcgctctcgagtgtgcgatccttcggtacagaagatcgggacacccagttccagatagcgccgcaatcgcagatctacgactacatcctattccgtggctcggacatcaaggacattcgcgttgtcaacaaccacacgctgccgcaccacaatgacccggcgatcatgcaggcgcagctccagaacggaccgccccagatgccgcagcacttccccatgcccagcgggatgagcggtccgccgcagcagcaacaggtgccgtcgcagcaaccgccccaaatgccaagcggtggaggcagtggtggtgctggtggagcaggagctcctggcggcggcggacccggctacggcaatggcaatccgttcggcaacctcggcggtcccaatctggccaacatggtgggcaatgcgggcggatcgcttgcacccggttccggtgctccgggcagcggacccttcatgcacatcggtggcaatcagcagcaaccgaagccccagcagcagaaacagccaaacatgctggccggtgcctcgcgatcgacgacgcccattagcctgattgtgagtcccacggcggagctgactcagcagcagcagctgcaccagcaacagaacgctggccagggtggcaacggacgcgatgcaggacataagcgccagaaccaccagcagcaacagaatcagcagcatcagcaacgtggcggacccagccacaacaatatgcagcagcagcagcaacgaggcggcggcagtggaacggacttctataaccagcagcgggatcgtcgggactccggacgtcaaatggacaacaactatagcaacaactacaacaacaataataataatcagcgcaatcgcggcggcggcaacggaatgcaacagcagcagcgaggaggaaacggcggcagcggcggcggcggtggaaacggaggtggaaacaacccggcctggaacatgcatcgcggcaaccagaactcgaacaacatgatgaacatgcgcaaccgcggcatgggatcccgcggccccatgcgacccaatcagggctatcgtccgcagtcggccaataatcagaacaagccgcggaacaagatcaagttcgagggcgacttcgatttcgagcaggcaaacaacaagttcgaggaactgcgctcccaactggccaagctcaaggtggccgaggatggtgcacccaagccagccaccaatgcaacggccgccactgcaactgcaaccaatgagcaggtgggtgagaaggttgaaggcgttcacacactgaatggcgagaccgacaagaaggatgattctggcaacgagaccggcgctggagagcacgagcctgaggaggatgatgttgctgtgtgctacgacaagaccaaatcgttcttcgacaacatctcgtgcgaggctgcccaggatcgcagcaagaacaagaagaacgattggcgccaggagcgcaagttgaacacggagaccttcggagtgtcctccacacgacgtggcagttaccgcggacgcaaccaatactacaacaataatggcaacggcggcattaactcgggatatggaggagcgccaggctacaacaggaacaattatcgcatgggtggcggcggcggaaacttccgaaacaggagcaacaatcgcaacaacggcggcggtcgtggcggaaacggaatgccaaacatcaccaatggcaacacggctgctgcgctgaaggcggccaacaatgctgctggccacggatccaatgccacggactccagtgcaccaaatgccacaaccgcgacgacaaagtcgacgtccctcttgccagagcagacgcaacaggtggcggcagtttgtgagtag

SEQ ID NO: 42801 - protein, 652 aa, DROSOPHILA
MSGGLPELGSKISLISKADIRYEGRLYTVDPQECTIALSSVRSFGTEDRDTQFQIAPQSQIYDYILFRGSDIKDIRVVNNHTLPHHNDPAIMQAQLQNGPPQMPQHFPMPSGMSGPPQQQQVPSQQPPQMPSGGGSGGAGGAGAPGGGGPGYGNGNPFGNLGGPNLANMVGNAGGSLAPGSGAPGSGPFMHIGGNQQQPKPQQQKQPNMLAGASRSTTPISLIVSPTAELTQQQQLHQQQNAGQGGNGRDAGHKRQNHQQQQNQQHQQRGGPSHNNMQQQQQRGGGSGTDFYNQQRDRRDSGRQMDNNYSNNYNNNNNNQRNRGGGNGMQQQQRGGNGGSGGGGGNGGGNNPAWNMHRGNQNSNNMMNMRNRGMGSRGPMRPNQGYRPQSANNQNKPRNKIKFEGDFDFEQANNKFEELRSQLAKLKVAEDGAPKPATNATAATATATNEQVGEKVEGVHTLNGETDKKDDSGNETGAGEHEPEEDDVAVCYDKTKSFFDNISCEAAQDRSKNKKNDWRQERKLNTETFGVSSTRRGSYRGRNQYYNNNGNGGINSGYGGAPGYNRNNYRMGGGGGNFRNRSNNRNNGGGRGGNGMPNITNGNTAAALKAANNAAGHGSNATDSSAPNATTATTKSTSLLPEQTQQVAAVCE

SEQ ID NO: 42802 - DNA, 2375 bp, DROSOPHILA
ttctattacattataaataattgtgtttatttcttaaaaaatatttctctgcataaaagggttttataaaaacaactatccctatgaacgggaatcagtatgtattgtttataaatgagtattcaacattattttggtttttgagcaataaagttcgacgtcattattgttatatctggtttttttatgcaaaggtctttaatcattatttttacctttccgatattttaaagtaactaaatctggctataatatatcgcctcatttgcaagccctcatttattatcgataaatataaattccttctcaccttcgtgagaaaacgtaaacaatttaagaaaacagaaaatgccctcggaaaacaggtgattgcagcataagtacttgcaaaactaatttacgaaatgcagctatactattgccactcaacagaatcaaaatcctacccaaggcggtggtctgcgaggagagcagcctgcgcggtgacatcaccttctcgtcgggctgtgtggttcatccgagtgccaccgttatcgccgacgcaggtcccataataattggggagaattgcatcatagaggaatatgccaccgtagctcaccgcttggagccgggcgccgtttgggatgtcaacaatatcctgagcattggcactcacaatgtctttgaagtcggctgccaagtggaagcggccaagattggcgataagaacgtcttcgagagcaagtgctatgtgggccccggtgtcactgtttccagcggttgtgtggtgggagctggaataaagatccatggtagtcaacgcctgcccgaaaacacgattgtttatggagagcagggcctgcagcgcgaggccatcgacaagcagggatcgcagaccctgcagatcgacttcctgcgcaaggtcctgccaaactatcatcatctacgcaagcccaactacgatcccaagaaggcgcgcagcgtggtttagttttaagtattctttatacatatatatctaattttccactttcattgcattaaactcggccatctccttttcgaacgtaacgattgtatgatcacacagaccctccagatcctccagtccccgtttaagtatatctatggctctgtctcgacgggattgaatgcggaagtgcagcttctgctccgtgggatgcggaatcgtgtagccacagaaatccacctccgggtagcgggctatgatcgttttcagcgcatttcccagcgtgtggccctcgttggtgaacacaaaagtacgagatccttcgccgtttttctcatcaccagccagctggggaaagtatttaagaattaattactcacattgcatatttaatgcattgtctacctctgccaatgctcccattttcagtttgttcaaatactcgttcgtttgtttacaaaaaacgtgcagggcacatgcctcggcaatcgatgttagagtcatcgaaacatatcgatttaagtagctaaggacggcttattccaattggaatgcaatgtagctaaaaactagagatgcctatcccattttgaatttaagtaaaacttagccatatcttcccgaaaaaactgttaaatttaagttgtgtatgtataaaagagtatgtcttctgaaacattcctactgtttgcttgtgccaagtgtcataccaacattgactttaattcttgaaaatcaaatgagttacttctaagtaaatgcataaataccgtggtaacgtcatcgatgtatcgatagcgcgccgatgtctccaccagctccagttcttgacgcgttctgacacggacgcggttttcagacagagcattgaattgtgtgtgttgcttcttaattcgctttgttctgtggccaattttattgggccaactgcgaaatcagttttgtgcggtgtcggccaaaaaaaagaagaaaaagtgtcgcaaacagccgcattagcataattgcaagccgccttctgcatacgtgtgtgagtgttggtttgtttgaaagcatcagcagaaaaggcggcaaggaaagaagcagagaggcgaagcggagcgaagaaaacaaaaacaaaaaaactgcaacggcaaacataattatttgcgcaatgcattcaacgtgaagttgctccaaaaacaccgacactcgggaaaaacgcatacaacgacgaatcggcaattcattttacatgctttttcgccgtttccatcaggaattgactgcaatacaggtttgtttaatgcccaccatgtgcttattaataacatcgcatacataaataagcggtattgaaaagctcgagttgtcatttcaattttgttgacggccacgccccccatctggttccgaaaattatgcaaattcatgcgcccttttattt

SEQ ID NO: 42803 - DNA, 318 bp, DROSOPHILA
atgggagcattggcagagctggctggtgatgagaaaaacggcgaaggatctcgtacttttgtgttcaccaacgagggccacacgctgggaaatgcgctgaaaacgatcatagcccgctacccggaggtggatttctgtggctacacgattccgcatcccacggagcagaagctgcacttccgcattcaatcccgtcgagacagagccatagatatacttaaacggggactggaggatctggagggtctgtgtgatcatacaatcgttacgttcgaaaaggagatggccgagtttaatgcaatgaaagtggaaaattag

SEQ ID NO: 42804 - protein, 105 aa, DROSOPHILA
MGALAELAGDEKNGEGSRTFVFTNEGHTLGNALKTIIARYPEVDFCGYTIPHPTEQKLHFRIQSRRDRAIDILKRGLEDLEGLCDHTIVTFEKEMAEFNAMKVEN

SEQ ID NO: 42805 - DNA, 4091 bp, DROSOPHILA
agacgcaagaagaggacatggagctggatgagacgcaagctatgggcaattcggagcaattcgtagacaacgacatcgagcaacttttcgacaatatcacaagctgaatggaaacgctgactgaaatgattatagcataggatgtaaattgtatatatcgggagcgatgatttcaccaactaggtcatctagacaccaccaagacactgctcatccttgggagacagctgtcaacatttcccctcttggcacaactcttagtgccgtctacatagtctttcttgtgatccatcataactttcaaagtctattaagttcgtatcgatcatctcaaaaggatccagttttgttaggtgacattcttcagcttttaataatacatgttcacctacgttgaatccaattactttcaccttattttagcttatatcatatcaagcattgtttttcataaataagccctaaatgcatcaaaaagttcacaagtgcttatttggctacatttctatactctgtaactaactattttttttatatctgctcagggagtttatgtgttcgtcccatcaaatttatgatttgtgtgattgcccgaccaaggagaagaggtttttatgaaagtcgctttactgcattgttttcacggctgactcctccggtaatctcgttgctcctacggcgttaatcctgcgacgctttgccttcgttgtcctatgtttccttgacaacacgagcgggatcaggatgctatggggcatggtgtatagtccacgggctaaggaaacgctcgtcctgggaccacctctaccgaccactgactccactgtccctttcaaacacgccagatccttgttcctccactccaaggatcgctttccacttgtactgctcgtccttccgtgttctgtgtgtttctcactgcctcgcacgttctgactcgctgattccttccccaacagagtttcattttttctttaatacccttttaaagtatcgcaaatttgtttagtttatttcattgaatgaagcggaggcgcggcctttattctttgataattatgcagatgcagataatgcagataaatgtgttaaatttcatttttaatagcagaagataaatttataggtagcaagaagttctacgacccctgtaaatgccggctgacggattgctctctcctgcactgcctagggcctgcatctgtcgaggaatcgagggtacaggcagacctcgcggatgtggtagcggttgagcagccagcagaggaagcgctccagtcccaaaccatagccgccatgtggcatggttccatagacgcgctggtccgtgtaccagtagtagggctgtggatcaatgccttcgcgcttatagcccttgagcagctcctcgctgtcgtagatcctcatcgacccgcccacaatttcgcccacatttggcagcagaacgtccacgctctcggtcaaacgctggtcctccttgcagcgctgcatgtagaaggacttgatttccgctgggaaacggcacagcataatgggttcgttgatggtatcggtcatcttgcgctcaggagcctcgggaatatcctcgccaaactcatagaaggtgccatcgtccttggtcacgttgttctccttcagccacttgatggcatcctcgtagttcatgcgacggaacggcttctgaggcggtttgaagtcagggttaagctccttgaccaagtaaccccatggggacttcagaacacgatccaccacgtcacagaccagatcctccaatcgatcaagcagatcatcgaaagttaggaacggacactcggcctccacgtgcgtgtattcagccaagtgacgccgcgtacgactctgttccgcacgatagctctgggaaatggtaaagacgtcgcccaatgccggcaggcaggtctccagatatagctgcgagctctgggtgaggtaggcctcctcgccgaagtacttaagcttgaagagcgttgagccaccttccacctgggtctgtaccagagtcgggggcgtcacctcgttatagccacgcgcctcgtagtggccacggaatgcttgcgtcacaacggatcgcatcttgagcactttcgaggtgttctctccacgaatcatgatatgccggttgtcgagctgcacgtccggttgtgcttcctcgttgagaatggcatcggcaccgccgggcggagccagaccaatcagctcccagtagtccacgttcagttcatgccctcccggcgccgtctttccttctggaactagtttcagggtaccgaacaggactacagagctttccgtgctcagggtgagcgcatcgtaggtctggcagagctgatcgtttagcacgcactgcaggaaaccggtgccgtcgcgcagtgttatgaagatcagggacttgccctgacgacgcagacgatgcacccaaccgtagaccttgacacgcgagtcgcggttggcagtgccctcgtagattcgaattttccgggccaccggcagactgggatcctccgagatcttcacctttcgagcatcctccagattctgctggcgcttctccgcatcctccgcctcccgttgcagcttatcggcattcttgtgcgactccctgacgaacagtttctgaattttcttcagctgggacttggcagccggctcgtagggctccgctgcattcggatccttggtgtctacgtaaatcgtgggaaagggttccttgcccgcatgacgcatcgcctgcaggatggtcttgaagggcttggactcactgccatcgccggactcatcactacccttcttttccgacgtaaagattgcacctgcatatggtcgtacatatcaacattgcacattatgaatcgatacatctggttcgctggcaacgtggaccaaatagttggcccagttctatcacttaaaaacgtgcttacccaaggttaactcagccaactgatcggcgggcatcttgcttgctttgtgactaagagtttactaagaactgaacttaaatatcgctaatatacgcacaaaattgcatcagcttcaagttgacaactttggcaaaacgatacctctcgccggatactcgatagacacgatgcaaagcaagtgctggaaaacgccgattgtcaagtggggggctgaaagtttaaaaatgcaataatttgatttttggacgggaaatcttctattacattataaataattgtgtttatttcttaaaaaatatttctctgcataaaagggttttataaaaacaactatccctatgaacgggaatcagtatgtattgtttataaatgagtattcaacattattttggtttttgagcaataaagttcgacgtcattattgttatatctggtttttttatgcaaaggtctttaatcattatttttacctttccgatattttaaagtaactaaatctggctataatatatcgcctcatttgcaagccctcatttattatcgataaatataaattccttctcaccttcgtgagaaaacgtaaacaatttaagaaaacagaaaatgccctcggaaaacaggtgattgcagcataagtacttgcaaaactaatttacgaaatgcagctatactattgccactcaacagaatcaaaatcctacccaaggcggtggtctgcgaggagagcagcctgcgcggtgacatcaccttctcgtcgggctgtgtggttcatccgagtgccaccgttatcgccgacgcaggtcccataataattggggagaattgcatcatagaggaatatgccaccgtagctcaccgcttggagccgggcgccgtttgggatgtcaacaatatcctgagcattggcactcacaatgtctttgaagtcggctgccaagtggaagcggccaagattggcgataagaacgtcttcgagagcaagtgctatgtgggccccggtgtcactgtttccagcggttgtgtggtgggagctggaataaagatccatggtagtcaacgcctgcccgaaaacacgattgtttatggagagcagggcctgcagcgcgaggccatcgacaagcagggatcgcagaccctgcagatcgactt

SEQ ID NO: 42806 - DNA, 1980 bp, DROSOPHILA
ggcgagaggtatcgttttgccaaagttgtcaacttgaagctgatgcaattttgtgcgtatattagcgatatttaagttcagttcttagtaaactcttagtcacaaagcaagcaagatgcccgccgatcagttggctgagttaaccttgggtgcaatctttacgtcggaaaagaagggtagtgatgagtccggcgatggcagtgagtccaagcccttcaagaccatcctgcaggcgatgcgtcatgcgggcaaggaaccctttcccacgatttacgtagacaccaaggatccgaatgcagcggagccctacgagccggctgccaagtcccagctgaagaaaattcagaaactgttcgtcagggagtcgcacaagaatgccgataagctgcaacgggaggcggaggatgcggagaagcgccagcagaatctggaggatgctcgaaaggtgaagatctcggaggatcccagtctgccggtggcccggaaaattcgaatctacgagggcactgccaaccgcgactcgcgtgtcaaggtctacggttgggtgcatcgtctgcgtcgtcagggcaagtccctgatcttcataacactgcgcgacggcaccggtttcctgcagtgcgtgctaaacgatcagctctgccagacctacgatgcgctcaccctgagcacggaaagctctgtagtcctgttcggtaccctgaaactagttccagaaggaaagacggcgccgggagggcatgaactgaacgtggactactgggagctgattggtctggctccgcccggcggtgccgatgccattctcaacgaggaagcacaaccggacgtgcagctcgacaaccggcatatcatgattcgtggagagaacacctcgaaagtgctcaagatgcgatccgttgtgacgcaagcattccgtggccactacgaggcgcgtggctataacgaggtgacgcccccgactctggtacagacccaggtggaaggtggctcaacgctcttcaagcttaagtacttcggcgaggaggcctacctcacccagagctcgcagctatatctggagacctgcctgccggcattgggcgacgtctttaccatttcccagagctatcgtgcggaacagagtcgtacgcggcgtcacttggctgaatacacgcacgtggaggccgagtgtccgttcctaactttcgatgatctgcttgatcgattggaggatctggtctgtgacgtggtggatcgtgttctgaagtccccatggggttacttggtcaaggagcttaaccctgacttcaaaccgcctcagaagccgttccgtcgcatgaactacgaggatgccatcaagtggctgaaggagaacaacgtgaccaaggacgatggcaccttctatgagtttggcgaggatattcccgaggctcctgagcgcaagatgaccgataccatcaacgaacccattatgctgtgccgtttcccagcggaaatcaagtccttctacatgcagcgctgcaaggaggaccagcgtttgaccgagagcgtggacgttctgctgccaaatgtgggcgaaattgtgggcgggtcgatgaggatctacgacagcgaggagctgctcaagggctataagcgcgaaggcattgatccacagccctactactggtacacggaccagcgcgtctatggaaccatgccacatggcggctatggtttgggactggagcgcttcctctgctggctgctcaaccgctaccacatccgcgaggtctgcctgtaccctcgattcctcgacagatgcaggccctaggcagtgcaggagagagcaatccgtcagccggcatttacaggggtcgtagaacttcttgctacctataaatttatcttctgctattaaaaatgaaatttaacacatttatctgcattatctgcatctgcataattatcaaagaataaaggccgcgcctccgcttcattcaatgaaataaactaaacaaa

SEQ ID NO: 42807 - protein, 558 aa, DROSOPHILA
MPADQLAELTLGAIFTSEKKGSDESGDGSESKPFKTILQAMRHAGKEPFPTIYVDTKDPNAAEPYEPAAKSQLKKIQKLFVRESHKNADKLQREAEDAEKRQQNLEDARKVKISEDPSLPVARKIRIYEGTANRDSRVKVYGWVHRLRRQGKSLIFITLRDGTGFLQCVLNDQLCQTYDALTLSTESSVVLFGTLKLVPEGKTAPGGHELNVDYWELIGLAPPGGADAILNEEAQPDVQLDNRHIMIRGENTSKVLKMRSVVTQAFRGHYEARGYNEVTPPTLVQTQVEGGSTLFKLKYFGEEAYLTQSSQLYLETCLPALGDVFTISQSYRAEQSRTRRHLAEYTHVEAECPFLTFDDLLDRLEDLVCDVVDRVLKSPWGYLVKELNPDFKPPQKPFRRMNYEDAIKWLKENNVTKDDGTFYEFGEDIPEAPERKMTDTINEPIMLCRFPAEIKSFYMQRCKEDQRLTESVDVLLPNVGEIVGGSMRIYDSEELLKGYKREGIDPQPYYWYTDQRVYGTMPHGGYGLGLERFLCWLLNRYHIREVCLYPRFLDRCRP

SEQ ID NO: 42808 - DNA, 4884 bp, DROSOPHILA
tgaaacacaaggcccatcaaaaaagctttatcctaaagaaactgagggctctcctgatgtttttactcacctcacgctgggtgatcagctcgccggcgtcgaactgggcgaccacagccttcagcacctcaggcgcgatggagggcaggacacgctcgtcgtagtcctggccgagaatggtgtagatcttgggcagctggtctggaatggggcggtacaggattcggagcgtgatgttgacattctgcagatccttgctgcccgttatcacaggaacgttgcggggctgggaccggatgtcgaagatgatgggccgctgcacccatgggatgaagaagtgggtaccctcgccgaccacgttctccttgatgccggtgaagcgatcgaagatgaccgcccggtggccgccttccacattatataatgccgaattgacaacgccacccaaaacggccactccgaggcccatttggccaatgcgattaaagaactgagcagccattatcctttgaataaaacaaacgtaatgtatttagttactgttctataaactatatatgtaaatgaaagccgactggacttggaaatttcatcagtttttaggttagaacgtcatggtttaatgacaatgtgctgtttgcgtgtttttatcccctgttcttcctggtcttcaaacgcagttagctcggctcgctcatagactcacttgttaaaggtttttggttgcacttaaattaaattattgtgcaattttgctctttgaaatgcaaaacacgaaatacaaccacacggcctgttatcgataatacaactgtcggtggggccgccatatatcgaaacgtactaataagaatcgtattcgattgtttcctaagattatcgattatcgaaatttaaaaagaataataataaacaaagccagtttacaatatcaaactacaaatggtgaaatttacaataaaagtttattattaattgaaaactaaaaaccccctcaaaattattgcgccatttcggctcgcccggcgacttttggcatcttcttgttcgtcgaatcctccagctccttggccttgtagtagtgcggagccacctccagcaaccacttgctctcgatctctataacctgacgcatgtactccttggaggtgaacaccagctcgtgatagagcacccagcgcggcagctcctcaaagagcgaggagttcggatgtatcatcacggtctgattgtgcttgatggtcttgtagtgaccgcccttcgagagtcgcgccacatggtaaaagtaaccagcggtggctgccttgcgcacgtttactgtttctggcaggcagctgaccatgtcgatctcgacacgctgcatcagtcccaccagctgctcccgcacgtcgcgagcccgcttcatcgatctgtactggatgaagttctcgtagcaccactgggtgctgtagtccgtctccgcccactgattgtagacctgcaggaggctcaagtggtcgccgtgcatgtgattgaagttttttcgggctgtgtccgcgtgaatgattttgtccttgggcctgtagaaaatggcgctattcacggacagcatggctgcaatggtcaccatctcctcggagcatttgtatctaaaacaaaaatatacgaatattatacgaattatttcacttctggtttgttagatcgattacatacttttcgcttgccagcagcatcttgcccatcatgggatccacgggaaactcggccatccgtcgacccagcttggttaactctccatggtgattaagtgcacccagggcatatagctgctccaaagccaataccagtgtctcgtgcggcggagggtccagaaagtcgaagtgtatcagatcattgatgcccagagcctttagcatgagcaccgcattgcccagattaatacgctgtatctccggaacggtattgtcctccagttcatgcttgtatgcccacgccgtatacagacggaagcactttcccggagcagttcgtcccgctctgcccgctcgctgattggcggaggccttggaaatgggcaccaccataagcgactccatgccagtgcgggaattaaaattgttctgcttggcaaacccaggatcaattacataaatgatgttgtcgatggttagcgaagtctctgcgatatttgtggccaggataacttttcgggcattcggcggtgtgggttcgaagattttggcctgcatatcactcggtagattcgcatagacgggtataacgatcagctcacgtattttggagcccagccgctttacgcgatcatgcagaacctcctggcaagtctcgatctcatcctgacccgtgaggaagactagaatgtcgcccaaaggttgagtggcatgaatctgcaaaactgaaacgcaacacgcgtcgatgtagtccgcttccggagccttggtgtagaatatgtccactggatagcggcgaccaggtatccgaaagatgggtgcatcatcgaagaacgcggagaacttttccgcatccagagtggcactggaaatgagcagcttcaactctggtctaaagcgagcaatatccttgaccaggccaaacaaaatgtccgtgtgcagtgtccgttcgtgagcctcatcgataatcatcacactgtaggaggccaagtcgggttccgaaaggaactctcgatgcagggtgccgtccgtcatgtacttgagaatggtgcgatccgaggtgcagtcctcgaaacggatgctgtagcccacctcgttgcccagcttcacgcccatttcctcggccacgcgtgctgccaccgacatggcggccacacgacgtggttgcgtgcatccgatcatcttcttgtccttggtgaaaccagcttccacgaggtactgcggcacctgtgtcgttttgcccgagcctgtttctccttcgatgatgagcacctgatgttcctttacagcagcaatcagatcctccttgaacggataaacgggcagtgatcttctggtttcgtccaatgtcaaacgtttgcgttccttctccgtgagttcgggctgtcggctagatgatttctctcgacttccgtccagggtaagggcttggatgaaatcgatttgatcgtcaagtagcagctcatactcctcctccgccttggcatctttcgcgccgaaatggaaacgcgccgaagccagctgttcagcctcccatttcttctgctctgagttgggttgcttctcaaactcatcaacctcaacgtattcagcttaagtggaaaaataacatataagtatttatcgaggaccaacgtacgttgtctacatacatcgctctccctttttcaggtcctgcggcatattataacgctggatgcgctctagttcccgcgccttctcgtgctccttggcgatgttcagcagttgcttcttgtactcgcgctcctccttctcccgtttggtcaggctgaaagcaaaccaggattatttggatacctatgtaggtaaggattaagctatgatcctacacgctctcatcgaagaggtactcatcgtccaggatgtccgcctccagctcggccaccttgtcatccttgcgcttctccaggtactggcgacgcgactgcagacgcaggtgaggcactatcttgtcccgatcctcatgctcaagcttcagtcgcttggtggcctcctcgatggcccttcgtccgccggtggaatcaaccacattgcgcgtccgatcgtcatcccgcttcttcagccggctggcgaactcgtcgcgctcctgcaggtcctttaggcgagactcttcctcgctgtccggctcctcaccgctgctgctgctgctggccgtgcgttttctgtttttacccgacattttcaagattgcctataaacaaaccggctagcgataggtaattcgataacatgcagtgctgccaagctagctattttcagcactgggtgagcaaacaataataatcaaattgctaaaaatatattatatatatatataatattctatatttattttattacaaattatgtttcttatattataggcttatttgtggcaataactagttttaaaggacttatgggtacaccttcatggcacattcaattttgtgtgttgctcatttttttttgctcgaatttattagtagagagcatcactgttcccctaacagctgtttaattcgttaaactcacctcagtttcatatcatgtcgcgccaattgagtttcaatccgcagaaagaatatgagttgatcgagtaccccggccgagtggtaaatcccgatcggatgatagccactctgggcggcatcatcaatgtgtctaaggtatggaattcaacctggtcaggcaatcgggcaacttggctgatatcttattccatgcacaggttttgggcgacgaagtgaaacgattggcgttgcacttccatccggagaatccctacaacaaacccacttttggggactgcacggataagactggtgtcctgctatccataaccgtgaggcgccacaaaaaggacaagcaacggcctccggaatattttgtgcgggtgttgggccactgcagcaggagcttcacctttgaaagtgagtagatggtcggaattccatccacgatatattctaatttccttttactttaagcgctttgtgatttccaatacctacccctctggtcaactcccaaaagtgacaacgcaaatgctgcccaggagctcacgtacgctttggaccagttgaaacccaaaaacaccaccgacttggactactttaagtgagtaacttgtccatattcgtgctctgtgcaccaagagaatgagatcctggtttgaaagctatatagcatgtataattaatcattttaa

SEQ ID NO: 42809 - DNA, 2696 bp, DROSOPHILA
caatcttgaaaatgtcgggtaaaaacagaaaacgcacggccagcagcagcagcagcggtgaggagccggacagcgaggaagagtctcgcctaaaggacctgcaggagcgcgacgagttcgccagccggctgaagaagcgggatgacgatcggacgcgcaatgtggttgattccaccggcggacgaagggccatcgaggaggccaccaagcgactgaagcttgagcatgaggatcgggacaagatagtgcctcacctgcgtctgcagtcgcgtcgccagtacctggagaagcgcaaggatgacaaggtggccgagctggaggcggacatcctggacgatgagtacctcttcgatgagagcgtcctgaccaaacgggagaaggaggagcgcgagtacaagaagcaactgctgaacatcgccaaggagcacgagaaggcgcgggaactagagcgcatccagcgttataatatgccgcaggacctgaaaaagggagagcgatctgaatacgttgaggttgatgagtttgagaagcaacccaactcagagcagaagaaatgggaggctgaacagctggcttcggcgcgtttccatttcggcgcgaaagatgccaaggcggaggaggagtatgagctgctacttgacgatcaaatcgatttcatccaagcccttaccctggacggaagtcgagagaaatcatctagccgacagcccgaactcacggagaaggaacgcaaacgtttgacattggacgaaaccagaagatcactgcccgtttatccgttcaaggaggatctgattgctgctgtaaaggaacatcaggtgctcatcatcgaaggagaaacaggctcgggcaaaacgacacaggtgccgcagtacctcgtggaagctggtttcaccaaggacaagaagatgatcggatgcacgcaaccacgtcgtgtggccgccatgtcggtggcagcacgcgtggccgaggaaatgggcgtgaagctgggcaacgaggtgggctacagcatccgtttcgaggactgcacctcggatcgcaccattctcaagtacatgacggacggcaccctgcatcgagagttcctttcggaacccgacttggcctcctacagtgtgatgattatcgatgaggctcacgaacggacactgcacacggacattttgtttggcctggtcaaggatattgctcgctttagaccagagttgaagctgctcatttccagtgccactctggatgcggaaaagttctccgcgttcttcgatgatgcacccatctttcggatacctggtcgccgctatccagtggacatattctacaccaaggctccggaagcggactacatcgacgcgtgttgcgtttcagttttgcagattcatgccactcaacctttgggcgacattctagtcttcctcacgggtcaggatgagatcgagacttgccaggaggttctgcatgatcgcgtaaagcggctgggctccaaaatacgtgagctgatcgttatacccgtctatgcgaatctaccgagtgatatgcaggccaaaatcttcgaacccacaccgccgaatgcccgaaaagttatcctggccacaaatatcgcagagacttcgctaaccatcgacaacatcatttatgtaattgatcctgggtttgccaagcagaacaattttaattcccgcactggcatggagtcgcttatggtggtgcccatttccaaggcctccgccaatcagcgagcgggcagagcgggacgaactgctccgggaaagtgcttccgtctgtatacggcgtgggcatacaagcatgaactggaggacaataccgttccggagatacagcgtattaatctgggcaatgcggtgctcatgctaaaggctctgggcatcaatgatctgatacacttcgactttctggaccctccgccgcacgagacactggtattggctttggagcagctatatgccctgggtgcacttaatcaccatggagagttaaccaagctgggtcgacggatggccgagtttcccgtggatcccatgatgggcaagatgctgctggcaagcgaaaaatacaaatgctccgaggagatggtgaccattgcagccatgctgtccgtgaatagcgccattttctacaggcccaaggacaaaatcattcacgcggacacagcccgaaaaaacttcaatcacatgcacggcgaccacttgagcctcctgcaggtctacaatcagtgggcggagacggactacagcacccagtggtgctacgagaacttcatccagtacagatcgatgaagcgggctcgcgacgtgcgggagcagctggtgggactgatgcagcgtgtcgagatcgacatggtcagctgcctgccagaaacagtaaacgtgcgcaaggcagccaccgctggttacttttaccatgtggcgcgactctcgaagggcggtcactacaagaccatcaagcacaatcagaccgtgatgatacatccgaactcctcgctctttgaggagctgccgcgctgggtgctctatcacgagctggtgttcacctccaaggagtacatgcgtcaggttatagagatcgagagcaagtggttgctggaggtggctccgcactactacaaggccaaggagctggaggattcgacgaacaagaagatgccaaaagtcgccgggcgagccgaaatggcgcaataa

SEQ ID NO: 42810 - protein, 894 aa, DROSOPHILA
MSGKNRKRTASSSSSGEEPDSEEESRLKDLQERDEFASRLKKRDDDRTRNVVDSTGGRRAIEEATKRLKLEHEDRDKIVPHLRLQSRRQYLEKRKDDKVAELEADILDDEYLFDESVLTKREKEEREYKKQLLNIAKEHEKARELERIQRYNMPQDLKKGERSEYVEVDEFEKQPNSEQKKWEAEQLASARFHFGAKDAKAEEEYELLLDDQIDFIQALTLDGSREKSSSRQPELTEKERKRLTLDETRRSLPVYPFKEDLIAAVKEHQVLIIEGETGSGKTTQVPQYLVEAGFTKDKKMIGCTQPRRVAAMSVAARVAEEMGVKLGNEVGYSIRFEDCTSDRTILKYMTDGTLHREFLSEPDLASYSVMIIDEAHERTLHTDILFGLVKDIARFRPELKLLISSATLDAEKFSAFFDDAPIFRIPGRRYPVDIFYTKAPEADYIDACCVSVLQIHATQPLGDILVFLTGQDEIETCQEVLHDRVKRLGSKIRELIVIPVYANLPSDMQAKIFEPTPPNARKVILATNIAETSLTIDNIIYVIDPGFAKQNNFNSRTGMESLMVVPISKASANQRAGRAGRTAPGKCFRLYTAWAYKHELEDNTVPEIQRINLGNAVLMLKALGINDLIHFDFLDPPPHETLVLALEQLYALGALNHHGELTKLGRRMAEFPVDPMMGKMLLASEKYKCSEEMVTIAAMLSVNSAIFYRPKDKIIHADTARKNFNHMHGDHLSLLQVYNQWAETDYSTQWCYENFIQYRSMKRARDVREQLVGLMQRVEIDMVSCLPETVNVRKAATAGYFYHVARLSKGGHYKTIKHNQTVMIHPNSSLFEELPRWVLYHELVFTSKEYMRQVIEIESKWLLEVAPHYYKAKELEDSTNKKMPKVAGRAEMAQ

SEQ ID NO: 42811 - DNA, 2859 bp, DROSOPHILA
cttcggtggctttcacgacaacaatcagtcgtatcattacttcaatgatgttcacatcttctctttggaatcctatcagtggcttaaagcggagataggaggtgcaattgtgccatctccacgttccggttgctgtattgcagcttctccggagggaaagatctacgtgtggggcggttactcgagggccgccatgaagaaggaggcggacagaggagtaacacacacggatatgtttgtcttgagtcaagatagtaagatttagaatctctgatttatattacttatattaatatctcctgtttccgttcagaaaacgccggcgatgcagacaacaagtacaagtgggcacccgtgaaaccaggtggatataagcccaagccgcgtagcagcgtcggctgcactgtggctgcgaatggcaaggcctataccttcggtggcgttatggacgtcgatgaggacgacgaagatgtgcacggacagttcggcgatgatctcctggccttcgatttgacctcccaaacatggagattgcaggagatccaaactaaaagcagcagcgctgagaaaaaggattcggaggagagcaaagatgtggagatgtcggctgttgataagccagtgaccaccaccacggatggcattttcacggtcaccgttggcggtcccagtaccagtaccacgccattcgtgtccaaaatacccagcctattcgccaaacccaagccgacgaatgtgccatctccgcgcatgaatcccggcatgtgcgtgtgcaagggaacgctgtatattttcggtggcatcttcgaagaggacgacaagcagttgacctacaacgatttctacgccctggacttgcacaaactggaatggaaggtgctaatccccaatagcttgaagggccacgaatgggaggatagcgacagcagcagctccgacgaggagtgcagtggcagcgaggaggatatctccagcagcagctcggacatggacacggattaagaatttccagtgactatatattaaatttggttaacaattgtacacatgtataaaaatggaatattttcaactgctgagtaagctcgaaattctcacagctccagaatctcggtgagaatgcgttgcgtatccttgggagtatataccctatggctgatggttcgaggatcgctatagatctcatagtcattgccgcccggctccgttttatcgccaaagaagtggatttccttgaacttgtagtgcgcttcgatgtgtcgcaggcagtaggtcttgtcccaaccatgcgggaagacatcgaagctgatctgaccaccaatcgagtacgtgagatccacatcggcaaactcctgcttcaggtccttgatcattttctcgcgcaccttgtgctcaatgtcgtactcggcgaacatgttgcgctcctcccgagtgcactgcctgccaatgggacaaacgttcatcatgccattccggaattcgataaaggtgcccctcttgatgggcacatccagttcggacagatagcgcagcacaaagttgatgaaacgcttcaccgtctcctcgcccaaatgcatgatgatattctgctttcccacctcctttccgccctcaatctgcaccagcccattttccgggaatatgaagtcgaactcgttgagtatcttcctgccattcagctgctcgaacatcttctccagatccgagcctccgacgattccgatggtcgccctcggcttaacccgcgagtagaagaactcctcgaactccggagtgaccacggatctgggcatcgttaacgtgccgtccacgtcgaagagcagcaggatttcatcacgcttcaatgcggcggtggtcattttgcatttaaattttgtggtaaatcagcaggtgtttaatatccagatatttatgtccacgtatgattcgagataaagaattttacaagcggcaacgcagtggtgagaaatcccctaaagctttcgatgcaccggcaaggggaaccagttccggaatccaagtgcaatcaaaattaatgttttgaattgccttttacgttaggtttactatttaaaacaatgagagtataaacattcaagcacaatcatttggattttcctgcatgtataggtaacagtttaattcatggagttcatgctgtcagggtacaaatagtttctattttaatagcaatttgtacattgcagttctttatcaggcaaactagaatacacatatttgggttcttaagtgtagcataacagggggttctactgccttttaatgtgctgcagttcatctctcttgattttgctgtattcctgcagggttttgtatttctcagtgttaaccatggggtccacaatgacggggtatagggtgaggcccacggcgcccacgatgcaggacacgaatccaacgaatctccaaccacgcaggactgccatttagctaaaatatggaatattttagctgacttttcggtttgttattataaaacacaaaacacctggttgaccgtaagatgctagaaaacgccaagtgtgtggtcacactactgtggtcaccggtgaagtgcagtaaatactacagaagagataacctgatagaaagtaaaatataaataaacaagattactgtatatataataaaaatagatataggtatagattaaactagaaatatcctgaatgctaaatatgtttcttgattcatatctcacttaagcattctccactgtgtgtacctgttggtattttttgaaatcatgtctatttctgcccgctctggttacactggcttccttgagctgggcttgggtgtggtgttttgtttgagtaattgtttttgcagatagat

SEQ ID NO: 42812 - DNA, 859 bp, DROSOPHILA
atgaccaccgccgcattgaagcgtgatgaaatcctgctgctcttcgacgtggacggcacgttaacgatgcccagatccgtggtcactccggagttcgaggagttcttctactcgcgggttaagccgagggcgaccatcggaatcgtcggaggctcggatctggagaagatgttcgagcagctgaatggcaggaagatactcaacgagttcgacttcatattcccggaaaatgggctggtgcagattgagggcggaaaggaggtgggaaagcagaatatcatcatgcatttgggcgaggagacggtgaagcgtttcatcaactttgtgctgcgctatctgtccgaactggatgtgcccatcaagaggggcacctttatcgaattccggaatggcatgatgaacgtttgtcccattggcaggcagtgcactcgggaggagcgcaacatgttcgccgagtacgacattgagcacaaggtgcgcgagaaaatgatcaaggacctgaagcaggagtttgccgatgtggatctcacgtactcgattggtggtcagatcagcttcgatgtcttcccgcatggttgggacaagacctactgcctgcgacacatcgaagcgcactacaagttcaaggaaatccacttctttggcgataaaacggagccgggcggcaatgactatgagatctatagcgatcctcgaaccatcagccatagggtatatactcccaaggatacgcaacgcattctcaccgagattctggagctgtgagaatttcgagcttactcagcagttgaaaatattccatttttatacatgtgtacaattgttaaccaaatttaatatatagtcactggaaattctt

SEQ ID NO: 42813 - protein, 254 aa, DROSOPHILA
MTTAALKRDEILLLFDVDGTLTMPRSVVTPEFEEFFYSRVKPRATIGIVGGSDLEKMFEQLNGRKILNEFDFIFPENGLVQIEGGKEVGKQNIIMHLGEETVKRFINFVLRYLSELDVPIKRGTFIEFRNGMMNVCPIGRQCTREERNMFAEYDIEHKVREKMIKDLKQEFADVDLTYSIGGQISFDVFPHGWDKTYCLRHIEAHYKFKEIHFFGDKTEPGGNDYEIYSDPRTISHRVYTPKDTQRILTEILEL

SEQ ID NO: 42814 - DNA, 40359 bp, DROSOPHILA
tatatccggcatatactatacgtatatctgtggctccgtctacacccccaaaattcgtacaaattgcaaattcacatgcgtatgtgcagtgattcaccgaatgagtgcgttggcctctggccgcaagttgtgaatacccagtgaatccctaatgaatgcaggccataaccacaatcctaaccagattgtagtatatgtatatatgtagttatggtatttggttgtatggatcgtaagatcggtgctgtgtagtcggcctttgcccagtgttatgagcacttttgtcgccgtgcgtgtgtcggagaaaaagatcactttaaaaataacagatttgtttgatgctatttataatagacgggccaagttttcgttccgtttcgcattgtgaggctgaggcctttggtgttccgagatctttggtggatcattcgtatctttcggatttcccagcgtcttctattctctggcactctagtagcctggcactcgactgcacttgaacgccattcgaatacgaatatagtggcaatattaatttgacagcgtttgtgtgttcgagtgtcgcaatgtaaacagccaaaatggcaagcggtttgatcgacaccaatttcagcagcacattggcaaatgtaaggattgtacatagaacacactatataccctatgcacagagagaactttttcattacaatttatttatgtaattaaaataagaaaaagtcataaaaaagtcataacatgtggttgttttttttttaagccacatattaaatttaagtaatccacaaagcactatatataaaaaatattttgtgtcacataagttagatttataaagtaaccaaccaactgaaactgcatatttcataaaaatgtaaaatgacattatttttcgccttctttttgttgtgtgcacaaatgaatactcttttcggctaagcaaactagagacatttattcatgaactcatttcatttatgcgcacccttggccaggcacaaattttgtttacattcgccagcgtcgccaagttgagaagagtatagtatagtatatacatatatgtgtacgattggattgcgaccgagtgtcttcatatatagaaggcatttcgccgatttcaaatgtcaagtgtatgacgtaaacaatgtttccgccagttatcgtattgatttatgctaattatagttagctaattgctagaccattgcaaccgaactaattgctaacgcttttcgaattcgaatattgtgattgcaggggatgtcggggtgtgatcaaagcactgtcgaatcattggccgacgatccaacagattcaccattcgacgccgatgattgtctcaaggtgcgcaagtactggtgctttctgctgtccagcatctttacattccttgctggcctgctcgtggtgctgctatggcgagccttcgcattcgtttgctgccgcaaggagccggacctggggcccaacgaccccaagcagaaggagcagaaggcatcccgcaacaaacaggagttcgagggcacctttatgacagaagcgaaagactgggctggagagcttatctcgggtcaaacaacaactggtcgaattttggtgagtaccctccacattggacgtcgtccatttatcatttatgagcccccttcttcgtatggtttggaaagtggcccgagcatatggtcacatttgccacactgcgggaaatattggtggtttcttataatggaattaaagaaaaatcaaaaaggagcattttttaacttgtagattgcctttcgttactagtctgttactacattgaatgtttcttaaaaaaaagttttatatgggaagaccttatcatatatatagacaataatttctgtcatgaaggacgaaattaagaacatatataagcttaaattatcatttagttttgttttggttaaatagaaaggcgggttattgggtatgcatcaagtataatcttcaagacagtatatttactgcaagagatgcattccctgaagttcagtaaacgaagtcaacccacatgccatcaaatacttagttatttctgcaagtgccatttctttgaatgccaaaagccgatgaattattcagggatcgagtgggtatatggttgtccgtagcaaggaaaacactaaggtgtccttgtccatcgttgcagctggcgaaagtgccatcgccttgcatttggagcagtttccaggcacaatcgactctatgccaccattggctgccacttgcgtgtgtaatttgtttgcgattgctgactgcggtggattcgggggaagcatttcgtgtcaacagcggaagcagcaaagtaaatgcgccatttccacgtacaataaatacatgagcacaaattgagcgggaggtgggtgcaattcgagggttcatttcaattaaactctgcctgcgtacgaattaactacgatggttttgtggctcttgccccacttccctcacaacagagcgatgaaaaacggttacttgttcaaatattacgcatacgtcatggcgtaccgacccatccattaactggccttagttaattactcacactggctcagcggcaatttagtgggtcttattgggcattgtggtttaatgcgctcgataagtatttctagatttgatgttgccgacacattgagtgcgagcttatcagctgaatatttgcatttgtctgggcgtctttaggtgggagggacatggtaaatcctctttgagtgtataaatgtactccatgataaaaaatataagcttttatttagttataaataaattagaatatattgtagcagctgtttcatgaaccatgggaaattggtatatcatttctgctgaacatattattctctgtacgataagcttcgttacaagtaaactttgattgcctatttgtaagttctcgagtgaactagattctttgacaaaagcgacaagctctggacgattgtaaggggtcaagggtgggacatccgtaaacttgcaccacgcatcctcccatcctccaaatcctcgccaggcagttcgacgctgcctcgttgtcaactggcgcacaatggcacagcggtggggaacgcgcattgccatgtagcatgtgctcacatttggcattaaacgcgccccccgcttttccgatttcccattttccgaccgcccgccgtgtggttagttgtgtctggcatatttatcgatagtttcgccctcgtcctgcggtactatgctacttttttttattagtttattatttttttttttgtatattttatttaaaattgattcacattttcattttatggctaaaataaatgaaaatgcctgtcgctcttgtagtcaatttgaacttttggctaatagcaggaaacgggctgcgaggaaatgatgtatgcatatgcttttggttgggagtcagtggaggagtgggtggcgtttgcccaaggaaccacaacaaataacagtaaataatatggcaaatgccaggatagaagccgtttgaaagggaaatgttaccagaaggaaaatcgatgaaacagcgcgcacatttccactttcacccactgcggagtgggttgtaagtgggcggaaagtgggcggcagattgtgaatgtttattaccaggcctagtcaccattcgcttgtagttgtgtgccgcgctttggcagccaattggctttgctgtttggcagacagcgtcgaatttcctttcctttctctttgttaccatatatgtatgaatgtatgtatgtgtacggcggtgcagctgttttcggaaaagtcctttcgcccattcgtgtggcgcccatttttgtgtgttgtttatccttgttgttgggcgttgttattgtggctggcaaaatgaatggcttgccatttggatattacacaattcgtgcctgctgtttctccttttttttttgccatttttctccactttccccgaattgctttggtttatttttaagatagcgaaagtctgccattttttgtccgcgttttttattgaactatccatgcaactctaagcggattgaagccctgctgcaggtgctaattggctttggtatgcaacttcgatgcggaagtcggctgcaagagcttaaatcccagcatttaccaccatcccacacccacatccgattgcacttggtcacgccacatatatgagtgctggaaaagctacaaaaaaaagtaataataaacagagaatccataacattttaaagtgctgcacgcaaacagaaatagtgaaatttatgtgaagcagatgtgccacagattcatttcaatttaaaaagaacaaggaaaaagtgtttgatttgaatttgattgacctaaccagctataaattctacctgcatgtatttctatttaatgacttaattagtggagtttacttcgccgtgcattcagttgaggccattaaattggttggctatcaaacggattgagaggcatgtatttgcggcattttggatagaaaaaatagcattcgagctttttgcaggggggggggggcaaacaaatcgaattgaaattgttatgagtgggacacgtgttttctcgcctcgtgacccagatttccagaatcgcgctgatgcaatttgatggcagccaggacttaagtgcttttctctctgtgaactcagctgctccgagtgattgacccagttttcatgcttcccggccattgggcataccaagttggtagaaagtgggtggcttggtttgggtgaaagtgaagacgtcagagaagaagttgtcgccatattgaaacctgcatttattaccttttgtccgtgacgtcagataagcgtgtaacggtgtggtgctttcattaggtttccttttccgacatcttgggcgatcatgacggcggctaatgaaagtgtcagttgcccggcaccacatgacgtatacgcaatgccagcaatgtgggcaaaactctttgcaatttacttgaaaattctagtctgtctaccgagattagcaaagtttttcgtgctgccaaaaactttattgcgcaactaacaagtttctaaggagattttgtgcttgtgtaatttgcatgccaagaaaaagccgcagagcaagaataatgagcaatccggccgggccaagacatttcaatttatggccctaagtaaatagtttgcgtgccggttttgtgccaaatttagtttttccttctcttctctgtggcacttcgctttcgattatccacgtaattacgaaacgatagtaccgacaattacaattacgattacattggcattttgtatgggaatatacgctatggcacatattgtactaaacatacatataagttaagtgcagccggctgaagttgaactacctcgattggcctctacgaaagtgttgttctcagttggcacacagccctgacatttaactagccacctcctcagcacccccggattttcatccttctcggaaattaccttgtaaaactttcatgactgccgcagatttatcaacgggttcggtccgactaattgccccagcagccgcgcattttttggctggacgttgtcctttcgtcctttcgccatgaatcaaatgatccgtaagaaccggagtccgtggccagtaccaaagtgtgcaattaaaaatgcacattactgcggtttttcctctccgaggaaagggacaaccatttccgatgatccttttcccttcaggccgcccttttcctcttctttccgttccattccttgccttttgcttttccaatttcctttttttttttttgttggttgggggagtgggctgctgttgagttcaatgaagcgttcgaatgcggttgtcatctgacaaggccgtgatttatggaacagaaatgtagcagctgctcatatatgtaaggcagttgtttgtgagtttattttgtaacagccaatgaatttatgagttattaaatgagcttggtgttctcttaagcagaataactcatgtcatgtggggttctttaatttaaaaaaatcgaaagggaaaatgtgttttcttataagctgttattaaagaataattgatacactttaaagtggcttgtaaccgtcctgaattttaattcattttctattttcatttgcaggtcgttctcgtatttatactcagcattgcatccctcattatatactttgttgatgcatctagcgaagaagtcgaaagatgccaaaagtggagtaacaacattactcaacagatcgatctcgcattcaatatattttttatggtttacttttttatacgagtaagttgccgacggccaattggacagacagacaaatatatacactgacacactgaccacaccagcgcacacactgagttgatttaagaataatttgaatcaattggtatggagcgatgatgattttgatattttggtttatgcgataaattcttaaaaactctttcgtttttttttttaatctgacaatcttcttacagttcatagcggcgtccgataagctttggtttatgttagaaatgtacagttttgtagattattttacaatacccccgtccttcgtatcaatatatttagatcgaacatggatcggtaagcgaaacaatcccttttaaattaacctatcacaatgaaaattccaaaaatgttatatgcatacaaatcggtgttgctcaatcaattggaaatcaatcagattcccaaatgtatttagatatcctttacacacatacactgtcacacataacagccacacatgaagacccaaaaaaaaaacagtgtcctgatcgatttgtatgcatgcaatgtgccttactcgacatgaaaacatacgcctgtatgcaattgtgtatataccttgtgtattatcgtgaacaggtcttcgatttcttcgagcgctacgtctcatgactgttccagatattttacaatatttaaacgtactaaaaacatcgagctccatacgcttggctcaactagtatcaatttttatatccgtgtggttaacagcagcgggcattatacatctggtatgtagaaacacacacacacacacaaacactcgacacacatacactgacgcgcgatcgattgtgcctgtgtgtggatgactctgtgatgggtttgcagtgtgtgtgagaagccagtcccgaatattacgcatacgccacgttgcagcctactacagagccccaaagccaggcaccttcgatacgccacaagatttacgaacatatatgtatctgtttcgatgtgtttatgaagtgaccaaccgaaaaggactttagatgacctgatccgctgatgcggctgataattgcatttgcatttacttaaaatttagctggagaactctggcgatccgctggattttaataatgctcatcgtttatcgtattggacctgtgtctatttcctaattgtgaccatgtcaacggtaggatatggtgacgtttactgtgagactgtcctgggaagaacatttctcgtgttctttctgctcgtcggcttggtaagttcgcaaagcaaatgcacaagtgcaaaaaaaaaaaaaacaaagaaaaaaaaaaatatatagaaaagtaaaacaacaacccgtctgaacacaaacagcagacataccgataagtctaagccttcttttagttctaaccgagtacgtatataatatatatataccacatatattatccagatgtagccagtgtttctctctcctatctctgtccgcccattgatgtcgatgcccattgagtttaggcccggccgatgcgggattggaagtgctgaagtgtgtgaatgatttaagttttggttgccgcctaatctactacttaccactagtacagttgtgctcagaaaccatagttgagtagccaaagcaagagcagtatcaataccagtatcagtatctgtatccgtatcagtactagccagagtgtagcactcttgatactctatattcaataatcgatactgagttcgaactcttttagacgtaaccatagagtaaccatgcgttgaccctgttgccctttgacctctctctctcttactcttacgtaactttagacttaatactcaatacatttgttaattgcatttctactatgtacatgccacgttatgtaaatacatagaacgacttaataccgctgcacaagttatgaattatggaactttatttgaggcccttcggctgagtttcgtatttgcgtttatacaaccaaagtttcgttagcttaactcatcacccaagcttaacgcgttttcttttttccgtcccttaacacgaacaaacacacgctcacacacgcccggatatatctgctacatatatccattcgatatccacaagatattatatctaatatacagctgggggcactcgaatcatacgctcacgcagccccattcaatactttctcccataatcgatacttatgcatgcagttaccttatcacttttaagttgaaactttcgatatgccttggtttttgtaatggaagattcgtagacaccaaacacgagaaatacccaacacacacagccaagagtgaggactatatgtttcaaggatctgtcggttaggataggagcttttccaatacattatccagtatattatccaaaagttaatgttcttgcatgctttaatgctggctgccgcatatttgtgtaaccaatggaccgatccagaacgcttttaggcatccttagaaatcctttgggtgtgaatgtcctggcctgacttcgtacccatcagaaaaccgccttctgcgtttccgtttttcttttttttggtccttaacgcccaagtgaaagtaatcaaagcatagtgataacaactagactaagcctaagacacaatcactatatttaaatcctaaccagtacatatatttttgctgaattgatttttgttaatttcgtgtacgatggaatatattttaggcaatgtttgccagcagtataccggagataattgaactcgtcggtagtggcaataagtatggcggtgaactgaaaagagaacacggaaagaggtagtctataaaaactataattaaatcctataaaaaaaaaaacataattatcgcattcgatgtgaaaaacacaaagccacattctaaagataatccacaaaaagttataaatcgcaataaatctaaaagtataacataaaaagatatatataaactttaccaagacagcaaaatgcttttagttaggaactaccatctgatgaggactattatcttaagatatcaaaaaaaaaaaaaaaaaaaaaaattctaacagttaggatcggttgaagtacaaaagaaaacttttgtaaaaaacacacattcttagtattttgagcccatctagggtgaagtaaaactccaattagataaatcactaagtcttaatattgatcaaagtcgataaattaaatagtctgttaccctttcactttgtttccctaatttcattgtatctctaagatcgcatatacagttgacttacccgcatcaaaatgtagttcagccgactcttaagtcgtccgttttaaactattttgttccttgataaatatgtatttcgaaaaccgaaacagatatgacatttgataaatcatcaaacaagtaataaaagtaaagtacaattttatcattcgattcttactttgtttcgtctttatttattataatttttaaacatttttgttgcctcgcagtcagagacatttcagcagattcgaaaatacatcgttctatttgtacaagccattaaacattttaatgttccatttacttaggtttggttttccaattttatttgtttattttccttggtacttgcgttcctcctaatttgtttcgtttcgttaaacatttttattgaactctttggcaatgtctatcatatataaatcactttgtaggcaagcgtgagttcattttggccattttactttggattttgtctgaagagtaaacatgttttattcaagatattatcgtttgacacttatactttgccatgctttaaacgtttcgtattaacaccagagttatgatacaagatatgcgtttatcaatttgcaatagttcaaggttcatatatatatttatttcgatatcccaaagcatttgtgcaatctacttaggcgcattgttgtaccacatcccacacagatttatagagctcccacttataaacatttaatctacaacactagtccccataaaaaagcatcggtcacgcattgaataaagtaaaactaaactatccaaagtcatgacacgtaattcaaatcgtattttcttgaagagagcaaactccagccactttgcaagatttgtattattcaattcatattttcccaccttattcctacttaatatgttacttcatttgtcagtctcgctggtccatttacttaaagtaaattcggtgaaccgaagaattgctttctcatcatcctactacttattcaatccgaagattcggaagcgtaccttaatcccttaatacttcatagtaaaatgtaattaggattgtacaaagtacggtatttgaatagcgtaaagactagcgcgcactaccaataatattttcagatgacttataggcgggatcttgctccccacgaacatctcgactccaaaatttgtctctgtctaggccccagcactgtcgtgtattgtaaactacatatgtaaattattagttgtaaccaagtaagagtacagtaaatagatgcgaacgaattgagaaatcgtggcgagaaatcgtgtaaagtaatgtacaattagtcttaaagtatgtgtatctgtatctgatggtgtgcgtgccgagtatgtgaatcggtgtaaataaatgagtgagtgcaatttgagtgaatagagtgagtgtgagtactgctgtgagtgtgaatcagagcttaattgcgggttgagcggttcccattctgcactgttcttcgtcgtcagcgtcaacgtcgttaaaatataataattttgtctatttcttttaaagccacacgaacactaacactccatagatcaaatttgttagcccagaacagaacaaaaccaaccagttaaagacaaaaaaaaaaaaaaaaataacaaactgaactgaactgaatcttcttttttggcacctctcaatcaatctaaatgtgtatgtgtgttgttgaatttaggccgttttcgctagttggataccagaaatcactgaactggctgcccaaagaagcaaatatggtggaacatatagcaaggatcctagaaaaaggtacacgaacacgttgctgactgtaccgctaagagaaattaccaaaactatacaacacgaaaatatcaagataaacaagaaatgattataaatgcaaacaaataccaaaaaaaacatcgcagcaatcgaatagtcttgaattctatttgtattacaacattttctttacctaacttcagtcaatgaaccaaccagcttacttattatttcatttgatttcttatttttcaccttgttgttgaacatttttatcgacgttacctggaattgcataaaaatgacaaactctgacggcaacaaataagtgacgaaaattgttgccaaattaaaaacaaaatatttatattgttttgttattttcataaagctaaaccaaaaaaaaaagaaagaattaagaaaaatcaattaggacttgaaaggcattggtttcttggcggcatgtgtctatatttagttaaacaatcaattctgaaaaaggaaacacattcaaagaatcatggcaaaaattacaccaaaatccagggaataatcgattccatacaaaagatataatttatgtaatttacttgtcaaatccttctgtaattctcgttgtcgtttacacacattatacttattgtttgaaactatggcttcatttttgcgtgcgtttcattattaggcttattgtgttagctagacagataaattgtaaaagttcataaattgcttaaaccatcaaagaattatcgttaaacaaaaatgtttctcttgtttggcgcctgtgggtatgcaacactttttgtcgtctaaaatctctgggccttcttacccctattcgtctcactaatctttactgtacaataattgcagaccttttgctaattaaccaaagttttatcgatgggctccccgcatttgttgtgttcaatatttaaagcatgcacatttcaaacttttgctagacaacaaaaaaacctacataaacaatattcaataaccacacaacacaatacatttttcagataatagtttacagaagtatttgaaaagggctccccaggcgaaatggacttatgttccaatgattttttagaaaagggctaggctcgctgcatttgaaaagtgtaatttttgagttcgtctttggtttctgtttagttttgactttgaattttgattattaccgtacatactatatagagcagagccactattgcgtgtttttatgcaacttcagctgcgtcattgtttttgagttcgaagtgttaagatcaaaaactagcgctgaatcaatatacatatgtaagaatatatatacatatatgttctcttaactggcttcttatttaattaccgaaatgcatttttattgtctcgtttgtttgtgcgttggtttcattatatttcgattttccaatttcggttgaaacacacttacacccagttgctgctttagttcccgcatagagttttgagtttccaatatgaatatgatttccatatgtttttcacttgttcctatatgcgatacatacataaataaagttgcagtagttacgatttttgcaatttcaacttatccaacgtactatatcgattacttgtaatttatttaccataccaatacgaaactaattccacaccttacctaatcgaacaatgtaatcatctatatttcaaagtcgttaatttgcttgcacccactttgtatgccgcagccacgcataaaaatataaaactagaacttaaaacaaaaaacaaaaaaaaaaaacgaaacgaaaccagtacgaaaccggcgcctttttggcgttgaaatatgtttttatgactatcatcatttagataaaaatcaattatgtttgtatatcagtaaagagttgcagtatccgtatcctttgatcgtattcagtatcagcatcatgacctcacattatctgtaactctttcccgttccgaaccgattcccacccgatacgatacccaacactcacacacatacgtgcggtttagtctgttagaatgttagcatcacccgatttgagtagtcctagtctagagtttaggcactgaaacccaccacaaagatgaagtcgaaagtcaaatggccgtcgatgtgtgtgcgtgtgtacttggcaccgagttactaggcgttactccgccacctagtctttgaatatgtttactgtatatactatatgtacgtatgttccgtaatctatccacacaacacgtaaccccaagaaaccattagagccataagaaactagctgcaagccgatgaaacggcccatcgatttatgaagataataagaccgatttgttaccataccttttgtttcgttgatatcattttgatttttcttgtttacgatcgaagacataacaataacttctagtctggttcaacgaagccgcaacagccagaggcacaagaacaacaagaaacaccaagaggagctccgtatgagatatatccgaaattatccacttgactgcgtttatcatgtacttatataggagtccttcttcgagtctgccgaacccattccccacatcatactctctgtttctctaactctctgctgatccttcgggccactttctctgtctcttgtatcctgtgtcaaacgaaatttgtgtaatgcttttttatttatgttaaacaacaatcaaaaaaaaaaaaaaaaaacaaaaccgaatagatcaaaaatacttcactgtcatcattatctttcatactgtaaacaggcgatttttgcaagttgtatacctgagattatagacttgattggaacaagagccaaatatgggggcacattaaaaaatgaaaaagggcgaaggtgagacaaaccaaattttcttacaatcaatcgtaaacaattaatcaacaaactgattaaaccaaaaattatataaataaactactactacaacaacaactacaataagactactaccacaaaaataaaataccaatcataatttttaagccaacaacaaattttcaaaactaaccaacaacgagcatttatgtttccaaaagtaaacaccaaatcaaaatgaaatttctgccaaaagcagtcgaatgaacagtgaaacgatatcaattgaaagaatttacttttagtttgctcttcattcatgccaaacgatttgcgagtgtggaaaagtagctgaaatttgattttgattctaccaatagatacacaccagcctaacaccagccatccacactaaaaagccaccacaaacatggccaatccaatccaattcaaccaaccagccaaccacgaacccaccaataccaataccaatccaatcactgtaatcatcatcagcaactcaagcgacacatacaatatattactcatacgcccagtgggaccgcttggaaagctcaggacggcacataaacaacacagtgacaacacagcatttgtacattccaactatccaggccatcaatcaaaatcagccaatcaatcaatcaatcacccagacccgaattcaaaacatttaatcgatcaaacactcaccaccaccgcaacaacaccaacaacaacaacaaacagccacggaatataaaacacccacacagcaattgaaaaaaaaaagccgcaatcaacaagaaaattttaactaaaatactcatattgcttatatgaaaaaagaacaacaagtgtatgttttagttctcgaacaactcattttgtgttggttgtacttcagttgatttccttttagttttgcgacctagacgtctctacatatgtatgtagttaaaaaaaaacaaatataaaaggtaacttaggacgtaacccccttggaaatggggggctgtgccgggttatgcattagtttcattacttttacctaagtttcgcccatcgatttgcgttttcatttgccactttggatttttgtgttctttgaattggcattttgcagatttgatcgtatttgagaatccgtaccacatacaatcaattgtttcgtacttaaaatactgttctgagtgtatctactatatcatgtgcgtactcttaactaccaaatgctatcttgttgtgagtttccatactacatcctcaatttgaacgccaaattatcaacttactcttctgctactttctactctctatatcgtactcgtacatcctgatcttgaacctaaattctttagctcctaacttttcgtttgatttgcacgttcgtctttagttccgaataaacgcggcttaatcgtgttcgatttacaattttgggtatattgtttaaatattattctttggttgatctagaaacgaattggatacgtgcaatttgcaggtcgacccagcgagtgtgaagtcagagctgatgattggcattaatcgaaattcaatatgcgtatactcttaagtttttctctttttctgtatgccatattcatcctagcctcgttttgcatttgtattagcccttgaagtgaatcagtgattggtgtttattattgtgttacattatcgtaattgtctatatagtccttgctatcgaagtcgtaactcgtatatatatatctatatacataaataaatatacatgcgtatatgtatatccacctaaatgatttaacattgaacgataataatgcatactaaatacaataataataataataataataataataatattgattcgattgtatacgtaaatgttagaatccatacaattcaaaatgtacacacacacatgcatagagtcgaactctctatagactttttctccccaagtacagacagcaatttgtaaataccaagcaatttccacggaagacttcaatttgctcaatattttttggctagaaaatgtacaatattagaacacacagcttgtgaactggctttgacatcttgaccaaaatcagcaggcagctgccatctgagaaacggattaaacatcgatgtgtgtgtaaagcgaatcaatgaaacctatcaatcaataatacccatatatctttcccgcatactatactcttactctctgcctctctatatattcatatctttctctcttcaaaccttcaatcagttatcagatactatcagtgttgtagttcttggaaaacttgtatacacataccccatgctataaacattcacacgcatctactctaatactcttatggttttgatactttcctcttctgttcacaaactttcgttttaacgaacattcgaatacaacggtatgatcaagtaataaagatataaacaatcataacctacagcacacacacacacacacagattatacaatgcgaatcggatgaaactgtaactccactccaacccacttttgtcgtaaactcagtgttgtgtatggatgcgctcggcgatttcatttgatttcctttgcccaccttgttcggatcaggattaagatcgaaagcaaattcccaatcaaaatcaggatcaggatgaggatcaggtaggaggtccaggacgattagatatgcggttatgatgcgcggcccctgttctctagctaaggaaccaaccccctccgatgaggacagttcaaattctgattctgagtgtaacatccgtatccgtaatcgcaaccgaacccgactccaccattgcatccgtatccgtaaaccgtaaccgtatccgtatccgagcccctccaaatctctacataaacacatctcctgtctctctcttcaactctgtctctctttcaagatctctcctatccacaatttttgatttcctcaaaagacccactcacattcattgcacatttgtgagcaatcgatttggcgcattgaaatcgacttatgttttcttattctgagcagcaattctgtatatgaaaataaaacaatgaaaatgcgtggccaggcatcaaatatgttaaaccttctcactctatattatatcatttcaagaaaaaaaaacgaaacatttaattccaaacgtcaccattcgtttctttagctgcagcaatgaaaagaaatacatgcaacaccagaactaatcgaatgtagtgtctttacttagtttctttgttctttaaatgcaaattgaagttcttctttcgttttagcgaactagtcgagaacaattttttattgccaccgtagaggtaatgagttgccttgcatccggatttgatctgcaaaaatggattgaacatacaacagagcacaatcatgtcatcgatcattcaattgttgatcacctttagattgtactgactttttgttaaatatttctacgaacgaagacttatatcgttttcctgaaggactattatcctttgactttcttcgacattgtagctacaaccgtgggtgtatagtaatcgtgaactgaacgatatggttcgctgattctcaacgcacatccacaaactcacaaaatcacaaacatccaacactcgaaaaaataatgtagaagtatgcatgtgtagtagtggcactgacactcactttttacttggtatgggaagaatgcctgcccggtttgcctgactgcctgattgcatgactgtgactacagtaaatacccaaaaacaaataatctattgtataattagcacccgtagaagtaatttatataccttgaatgagcgtagtgtattatacaatgtgtatatagaaaacaaatgcgttggccagttgctgactacttttgatgcttaacttgatgcatgtaagttgattgcaaccgaaaatggtgtgcgtagctaagcctttatagtacctaaaacaatattgattttcgataatcgtttatatatacttatcatttcgattggcgaactgcagcggcagagtgccgaaaatgcggcgacaagatcctcattttgtgacttttgatttattgccattgattgatttgtgtacaagcccccggggtagcagactaaattcatgcattttgcatttatcatttaagtttttagtttcaattatgagttcgtgtattttgtataattttgataaatgtttgtttcctaagaaaatgcaaagtaattatactttaccaccaaataatactgacaagccataaagataatcataaccaggcaacgataagcagttgataaataatacaaacagatcaaagcataatcaatataaagaaatatacagaaatacaaacaatgaatatacccgaatctataacctcatcgaagaacatgcactcattcgaacactcattcaaagcactcaaacacacgcacacgcacacgacacactgacaacacacacagacacacctatgtactatattatggacttggcttcatggcagctcaatggaatgtgattaaatctgagataataatctaataattcggctaagaaagtgaatttaatttcatgacttgaactaaattcattttactttttttccgctttaatcgcacactaacactgaaacaccgcaaaacacacacacacacacacacatacatgctcatttgaaacacacacatacgtcacacatgtacagagcttaagtgcattccacactagatttaagtcaaattgttgcattaatcgtttgaatcgctgccaattcaaggaactaatctattttttctatctaccccccaccttcaacaacacaagacatattgtggtatgcggtcatataacatacgaatccgtgtcgcatttcctgaaggacttcctccacgaagatcgggaggatgtcgatgtcgaagtggtctttctccatcggtaagtccatccagaatccaattagcctttaagcagaagaataacctgtttacagtcgtattgctaatttgttgtgtcgttgttttatttccattattatttgataaatgtattttcaattcagttttaaaacagcagcaagagaataattagcgcagtatctaagcagttaaaaagaatgtggattagcggttagcagtggcgcggaaaagtaggcaatagttatttgcactgaaaagagatcaaaccatttgcatagtaatattatttaaaattgatttagatctgtgcagctgctggccgcttaatcgatagttgggagttaagttagttcaaggcactattttaagtatttgcattaatctagcgactagacacagtcagtgaaagttatgtaatctttatgatttgaaaatacctcttacgttcactatgtaactaatcaatgcctaaactcaactatatatatgccatatcatgtactgtaatgtaaaccaaatagcaaagagcctgatctggagctagagggactgctgaagcgtcactataccacagtggccttttttcagggcactatgatgaacgcagtcgacctggagcgagtcaaggtacacaaacacacaccgtgacacagacaccaagccacggccacacccacacccacacccacacgcacacgcacaccaacagacacaaacacgaacacctacagacacacagagacacacatatgagaaccagtgaagacacgcagaaacttaacgatttaaacgatttaatcgagcccccgattgtcaggtgtcccagcaaaagaacaaaatcaaactccaataaaatcaagaacatgaacaacaacagcgaatcttacgtgcaactctcatacttagatcctgtgatttgtttttgtgcccgcaacttagttcttcaacagctaggatgcaaatttcactctacttgccctccgattcgaataattatcaagaatttgaattccattcgctgctgacctttcacagcaaaaatagaaaacaaaacaaaaatgaaacaagacacgcccccttcctcgttctattttttatgccataaatctatgctcgctctcactttgaacttgaacaattcaattatttttatttttattgcaattttatagctttattacggcattattattaatggtttccggttgctgctgatgaggcttccgagaagagcattttgcctaacaattcctctcagagcttcgtgataaatgatgtttataatattttagatagactttagttaagaatcccgttcacaatatacaatttttttttgtttcatcgttttcttttttttatcttggcttaaagtatttttaccccgcttaatggaatgacttttttagctgaatttttttcatatatccttttaatccaaatttaagctcaagcttacaaatacttcacaatttattatattttatatttattaattcgtagtaagcaaaagttgaattccaatattcctcttgtatcatatccgtacagtttttatactcccatagaatttacttagtcttgagagcctagttaagtaatgttaattagatatttaagacgagttttttgtctagagcatagacttaatttaagtaaggaggttacaatatttctactttagttcagtttacttttaatgaatcacagtttttgttgcaccttcggcttggagattttctttacaacaattctgtctgcattgtttgtttttcttctttttcatttgcatatttgcggactacgaaaatcgcaccataatcataaatatctgtatattgtttgttgtgtttcgaacaccaacccacacacatgcaatgatatgatattcttctgttcctttgaatacaattcaatctacgtgaactctgtgtacattggaatcattgaaaactctaaaaactttgtattattttcccacaacaaccacgataaaccgaaaaaaaaaacaaaacaatcgattttaaatgaaaaattataaagtaaaccacccgatttggaacttgagggtttgttcaaacgtcattttaccaccgtggagttcttccaaggaaccattatgaatccgatcgatcttcagagggttaaggtaaaacaaaaatgtattttcattttatccgttctatatgtttgttcgtttgcttttgttacgttgttcatttaactatattcctttccgtgtctattttcgtctcgacctgtgagctttaatttcattatgtattaactattaaccgaagtcccagaataagcgtacttctacttcttacgtacttatttatgtaacgaacgctcaaatgtaattacaacccgcctattaatatactaatctatgtatttacctgtgtgtgtgtgtgtgtaatgtctgtttaactgtacaagcgatattcgtgtaatacatgcgtgatgtatgcgaccatactgcattttctggacctagtttagtttacaacaccacaccacacatccatcggtacatgtatcctttgaatttaagcactcaactaacatctgatcatgaatcaaacgaatcgaacgtgaattcacgaaacaaacactcgttgtacacagaaacaccgtaaattgatgttgaaattgttgtgtaaaataataacgatatcatcttgatttatctttattttaatctgcatttattgcaacgattaacgtatacgtaatttcctatttatgtatgtgctaagtatattactgtacatgttaagttaagtgttaattgtataatatggattacataggatttgagggtttttagtgttaattctttaatatggattttttgaagaaattgagaatatacatattaaattggtaggtaagcatattttaaacaagttgaaacaaaaaaaaaactgttaatattatttgcaaatatttctaaaaattcaagatcataggcttaggtattctaaaatatgtaaaataacattttttattagaacaggtttattacatatattccacgtaaagaaagatatttatacagttatacagtaagtcatattttgagcagtaaatgtttttgtgagtctgcccaattcatttcttttaattttgagggaaatgtttaattatcgatagtaagccattattaagtacgtgccctaatagtttgtatatatgtatatttatcagcttaatcgatatcctttgaatggacactcatgagcagccttggctttgtataatgccatattgcgatgcagatagttactttccacagtatctgagcttatcttttgcatgcgagcattctgcatgtctataatcggatacagatgcttgtagctagtgccaatctattgtctaaacgcccacttgagttgctcttgagttttgtgaggctttggtatttggtatttgattaagtttaagttcccccacgccaaagccaatcaccccgacacctctgtgtacttgttctttgtgaaaacaccccacccgtgcaccgagcgttcgccttatgatttcttaatgtgtccttagtttggagttgaaaccgaaagactgtgttatccagcaacccaaccaaccaaacacccacccacccagccactgtacaaccgcttactatatccccaaccgacaccctgtgggcaatgctaatgaatactacttgtacccccgcccaaaaaaaaaaccctactcagtacgtacgcaatgcatatgcaagatatttatatatatattgatatgatatggactcgatcgcagccagatcaatcgagccaaccaaaaacaaacactcacctgtggcattttaagtactcatactcgtaccatagttgtccagtcgatgtgcgtgtaaaccaaaacaaaaatcgcttactaattgtttatattgtggacaatgctctaaacgtgacaccacatctgcaatatctaatcacaataacagtaacaataacaatcactgaaccataacaaactacttggaacagttcaacataacaaaactaactcacatgagacaaacatcaaatgcccatagacatagtctgaccataaacagctatactagatagcaattataactatactatactaatctgtaaccattaatttcaatccttctatccatatggatatgtcgaatggaataggttcatgaagccgacgcctgcctcgtgctagctaacaaatattgccaagatcccgacgcagaagatgctgccaacatcatgagagtcatctcgatcaagaactacagcgacgacattcgagtcatcatccagctgatgcagtaccacaataaggtgagttttttttttctattatatagttgctattatataacataacagatgatatgacatttactacctaagtcaggttaattcatgcatatcaactatttagatcatttcatatactttcaaaccctctcgaagttttaaaacgatccctatgataattcgcaggcatacttgctgaacataccatcatgggattggaaacagggcgacgatgtcatctgcctggccgaactgaagctgggcttcattgcccagagttgtttggcgcccgggttctcgaccatgatggccaatctgttcgccatgagatcgttcaagacggtaagtgtggggttgcagtcccagtccagagatcaggccactcacctaagaaataccagacacactcacactactggcgcccagtgaaagcaggccgaagaagttagatatttttttcagatctaccgattacagattacaaattcgcggacaatgtaacgcccccggggggggtgcaagtaattaactatatgtggggtgtactgtaccgtatatacgtatgaaatcaaaaatatgcaaatgtctctaaattacgtctctaacccatagtcgccagacatgcagtcttggacaaatgattacctgcgcggcactggcatggaaatgtacactgaaacattgagtcccacatttattggaataccatttgctcaggccactgagtaagtcacgcagctggcagttttccaattttccaaccataagctatatcgtaatattcgtaccagaaacaaaaaaaaccaattaaatactatatcgtatctactactactctattctactcgttaatcgtgcagcgttgaacgaaaaaaaaaaaaataaatcgtacaccatgaacaacataagatttattcggtctacaaactgaagcttaattgtgatttatggatgtgtattttttagcagttaaaaatcacaatttagccactttgtaggtcgatgaaacagctcacaactctcacacacaccacaatgaaacacattgttattcgtttcactcagttttgatcgtcgttgtaaatctcttttttgatgattgtattttaagttgattttgatcgaaaatccggcacgtttacaccgatctaagtgttgcaacgtgtaaatgtgcctgccagtgaacttagattatgattttccaaacaagtacacacaaatacaccagccaagacattacactctgacaaattagtcgttgtttcaagcaaattctttgtgtaattgagtgttctaagtgttcaaaatgccttcagtgtttgcaaatacaaaatatggtttcttttatccttcattttcaaaagcaaacttcaaaacttcaaacggccagttcaactggctctatttatttaaggacaaacaaacaccatactcacacacccacacacatacacacacacacacacacacacacacacacacaccgatacatagacacacagccaatcgctaatgtatggtatatgtgtgagcggatctatccgaatctctctctctctgaatctttctctaaatcaatctatctatttgtatctcagtaacagttctaagctctaagtttgcagcgtgcatttttcagttgagttgattcttttccgttcccgatagttttcagttcgaccttttgatttttgctcatttgacacacgttcgggttggttgagtcttgatgccaatgatcccaatgctcgtgccttcttcaatgctgtaaagttcgccaaatcgccagaaagtgtacagaccgaatgccaccaaagataaccccgtgatcgaagcagtatttctatgccaaaagccaaagccaatgccgaaaatgccaaaaatgccaaagccaaagagtatgcaatgcctgacccagaaacaaaagcaccatccacaccaaccagcaccgatactcgccagctgttgaaatgtgtgccgtagatccagatgacccagaaagcgtaggacctataccccaaaaactataaaaaccacctgccacagccacacaaaaccaaaatcaaaaccagaacagacaaacaaataaaaattagtaccacaaccgataatgcgccaagtagttactttagcgaacttactaaatgccaaccacaacaaaaccattttctaactttcagtcaccagacacacaggcctggcaaaatgattatcttcaaggtacagggtgtgagatgtacaccgaaaccctatcaccttcatttaccggcatgacattcccacaagccagcgagtaagactcaaaaatgagaaaatagagaaaaaacaaaaactaaaacaaaaaaaaaaaatttatatgcaaactgtataaaaaatactactacttctactactactactactacaactttttgcattgtacaaaataagtttgtttaacaattctttttcctattatttaacaacttgattcgattccgtttgatttactctccttctcctcatattaacaacaactaaacaactgtttgtcgcctctccccactgtcccacctctggccatgtatctttatatacatatatcaaaaacccatactctagaaccatagccactgaaagattcaacttagccatagccaccagtactcgagaacccgagatcaaatctttcgggggcgaacgcattgaacaacctgtatattaaacccacactcatttcgattggctcaaactgcatataccgtatccgtatacctgatagtatccgtatccgtactcttattcgtatccgtattcgcaactgcaatcgtaatccgcatctgatcgccacaatcgcttgctaaccttgaactccgctcgctgcgatttgtagagcgtcagacacgtacactgcaaataattctagagaccccacccacagaacagctccacttgtgactccacttccgaagtcccgaactcattgcatgtgcagaatgttttttagagtgtaccctagttggcaatggatgatgatgattcactgtcggtagttttgttttttttttttcaaacaataatttttttctagcattttttccactaagcattttgctacgcatgccctttttttcttgatggttcattgatttttaaaagtgtacgctttcaaagcacccaccaatacaacgacacatacacacacactcacaaacaccccactcacacacacacaatatgcatgccctgtttttgagagagttcgactacacttttgtagcatactaaaactaggttcaattacttgtaaagcaacgaactagactaagttgaagcgatatcgggcgatcgggaactgattaactttccctcttccccgcgtctagactgtgtttctccaagctgaagcttctgctgctggccatcgagatcaagggcgcagaagagggggcggacagcaagatttccatcaaccctcggggggcaaaaatccaggccaacacccagggtttcttcatagcacaaagtgccgacgaggtgaagcggtaagaggtcacaatgcaaatctatcgggcggcatctgggtttcacttttctctacgacatatgttttccatgtagagacaaaacacaccgcaagaagtctatatgtatatagtaccataagtatataatcaatataaaatatagttaatacaaaagtgcaagccagaagcaaccataaacatatccaacaaattgactataatttataaatttaatttccttagtgcctggttctactgcaaagcgtgtcatgaggacattaaggacgagacgctgatcaagaaatgcaaatgcaaaaactgtaagcaaacccttgtaccaagtagtagccacagctatctttttagagtctttatgtatctatggatttaatttaactttttccgttttgattttaatatgtatttgatttgttatttcgtttgtgaatcgaatcgaacgtttcgaagacagccagaatcgaaaaagccaagagaaacgataggaaataacaattgattttagtttgtaagaaggaactagcgagtgttgagtgaggcagtttctaggtataaggcgctatctttctaatctttatgaatatctaaatattttacctctccaccatgaaactattcgtatattcttacatatttttatacataaatatccatgtttttattatatatttattatgtatgtgtgttggcgcgtgtggcctcgctctcaatgaaatcaataccaaaaaactgcaacaaccaatcacaacaactaactataactataactatgtataatcgaaccgaatcaacaataccaaaaacccattggcatggctgcaactgttcgaacacacctcgcacatatccgtgtgtgtgtgcgactgtgtgtgccgcacttgcaacgtgacataaccaaatacaaccaattaaaccgaaatcgaatcgaatttaataccaaataatacaatccaatgccataactttgtcccacagtgactgttcagcccaggagcaaattcgatgacttaggtaaatcaagctacaagccgaattatccaaagaacaacaagaaaacacactctaatcttgcccacattaaaaaccaaaacacttgaagccacacaaacacttctcagttttcaagttttacccgataccaataccaataccaataccaaccgttaccgattccaacttttgtataaagtacattttgcatacccccgttaccttttgtttgtacattgaataaagcaaagcgaaggtcccgattcccgaaaacgatccccagttgattttcctatcagcacctcacctcaacctcaagagcacaacaaaatcaagaattttcctttgattttgattgtttgtctttagtttttgaaacgattttgcaaggtgaaccattggacccaccctttgtgctcagcccctaaccataaaaccgacgtttccgatatcataaccatccagcatatactcttatgtatacttatatatatctgaacaacaagccatttcgtcctgcccgattaccttgcccatgtgcagttccattttggtcactgtttgttttgacatgcgcctctttgtaacccacgaagtaagagttaaatacacccacacctataacgtttaactatttatgcccatacaattatccaatgaggataaaaccctgaagcaaacaaaacattacgtaacattgaccttgtaaatatgtttgtgcgatatgcaaccccagttctttgattacctatactacagccacagtcaaccagcaagaaatgttaaccaaaactcttcgcttttcctttaaccatcaccaaaaaagaaatccattagagtaccaccatgatagttgacacccaccattttgagttcaaaagtgaattttgcgttttacggggcgtatgggtaatatgccagcctgcagaagtgaaatacaaaggcggaactgccatattcgagcagagaacaggcgccacgcaaattattcaaatttattctaatatttttctatttttaaaactcaagcctagtttgcaactcgattacagctttgtatttcattaaaaggcatgagaacctctttaccatctgtatttcattatgaacttataactcacaacccattgatagccctcttttgataatcgatttttgttccaattctgaaactgcacattttttttaaaagtctgtctcgctaatcctcgctcttgctatctctgtctctgtaatcccctcttaatctttgtactttatacttatgtgttgagaataagccgagatcaaattaagtgcatggaaatgagcacaacaatcaattaacattctatcacaccatcaccatacgaagaacctttaatataaaaaactatactctattttcgatcaattttgactcacttttgcagcatccagctctaatttaaatactcttcctaatacttatgactaaattatctttaatacttaccggtagacctaagttcttgaaatgctgcgccgtcctcacgaatcccctaacacttttcgttgatttgtgttcttgggcgtggcactcacctcactcaccgatctctatttacattttaaagtataaagtttatacatatatatatctaacgcgattgtatataaccgcgatcgtagctgcaaagccaaagtgtaaataacattagatcaggttacgcggcagaagttaacatggcgttttcagagaataaccaaagtttatgtatttgcttctatgtagcataatactagaacaatctcaacctatactctgtaaacacccaacttagctgcaaatgttcttaagtagttagtacgtttgccgagtttgcgttgcctgcgttttggctttgaaaccagcgaaaaatcaatttcgggatccaatgtgttgcagctgaatatgtgaaacgcagttcgtagtgcctagagcttaagtttctgaaccaatcccagataccgaacccagatatatacacctaactgaactctatatacatatatgtgcatttgtttgtgtgtatgagcgagtgtctatctgagtatctaccaaataccaaccaaaaacgtaaccatcttgcagatgtgggcatgattatgatgcagacgggcatggtcaaccaaggcatcacgtcggtgatgaatacaatggagggtacgctttcaaatccatttccacaaacgaatccccaaaccaattatttgcgatttgcggcgctctatccagtattaatatccgtttatatatatactaccaagccaaaagaattatttgttgctgctaatcccgaacctaatcaaatcgatataaaagataaaaggagcgacaaccaaagtacaaactattgtaaatataagtaaaagtccgttgatccgatatactttgacatctaattaaagaaattcctaatttgcatcttctttagtaattttaaagactttggttagcgctcctgagatttggcttgccaaattcatagagaaaggactatcctttgaaaactaattgaacttggaaactaaatcaaaattactaaattgatgtacaactgtcagcgtttgtgtgccttagttaatgctaaaaaccatgaaaagctcttagctgctaaatgccaagaatccccgccaagaaccgaaacccgcatcagttggctggaaaactgggaaatcagattgtgaagaaatgggtatatagaatcgataatagcaaccagggaactccgagtaaataagttttagactaagagttgagttcagttcgtacttctacttcttctatcgctctatcgttctctctatcgtactcagtataaatataacatacacctattatagaactaatttagttttgctacgatttctggtttggttcgcccaagagtcgcgtatagtgtcataataaatcgaaagcatatctagtatatattccttatatacattgcatacatatatctatttatgatcataaactgcataccacatatgaatatatctacataaatataatatatattatttacgaacgttcaagtacaacgtgtgccgtgttttttacctatgattttcgtatagcgtatttaatttcctatgatttattcatcattttcgttgaatgatgttccaatgataagcaggcgcaatattgcgagcagatgaaaatgaagaaaaactaaattatattgaaagcaacaatcattaccttgccatcatttacctattcacacgatcctataaaattctgttttcatgaaacaaaaacagtggccaccttccggaaaggcgtccgagccgtacaaatggttgggcgtgcaagtacgtataacttactctacctctctctctctctctctctctctctctctgcctctctctctctatctatctcctgtctctgtctccactactctactgttaccaataagcatacgaaacatacatctcataaccagaaaccacgaaacccaacatgatttccaattggcaaaccaaaatttatcatcacattcgccctataaactctcctgctaatcaagttaaaacgctcaattacatgtttatagcgccaaactaactgtcatctaactacaaactaactaaccaactctaattgctattgttcagctgtatatgccatttgccattcagcaaaccaatcgaaaactaagccaatcaatcaggcagccaaacaatcgaaaatcaatcaatctttgtcggagctcagaattcagaactcaaaacacagaacacaaaacaccaacacaagcacacaaagtccctggacccgccccccaaataaccaaccgcccccttttccaacactaatgcactacacaacacacacatatgtacatgtttcgtttctactcgtttgttctagtaattgtgtactgtttcgtattcaactttaaccctagtgtgcgtgtgcgtgtgtagtaaagtcaagagaaaaccaaaccgaacttcgctttgagtcagttaatattggaaatcaactgtttggatactaaatattcagtaaccataatcgatcgattcaagcgttgtgttttcgtatgagctccatactatccatactattcgtttttgttatcaagtcgagtcatattctacataataatcgtactcctactatatcgtaaagtatcttgtacaaacgttacctacatattgtattgtatctatcgtatcgcattatatcatgtcgtaaagtaattcgttaattcgtgatacaaattctaaccgttcacgtatctttggacaactatgtcatatccaaacaaatacttcaactttcctatttatatgatatactaagtggttacaccaacactccaatgaacacaacacttcgggttccactgacctgcaatcctgaaacacaatatcacactctacactcattttctgtaatatatatatatacaaattcgatcttctacgcccggacctgtgttcctttctatataatatatcaaatatgtaaacctatcatctttctattgtacctccctacccacacattcgtgttccgtatcaactactacaactacaataaatactcctatttatatgtctctgtgtgtgtgtgtagaagacgatgaatactcgttgtcaagtaagtcaaactaactcaaaatgttgtttatccataccagaaattaagaacatccatttcaatatcgcatttgtacttgtcgaaaacatatcgttatcatttgaattactagagtcctttaaaaatttcccttcaaaatatagtgatttgtattgttagttttgtttcggttattacttgttttcgttttgaagagagaaccccattatgttagagacattctcagttttagttttaaaccatacataaatcaacatgaataaataaaatgcaaatgacttgagaaagcaaagcaactgagccaatgattagaaccaatattcgatcacaaccacccaaagcagtaaaatgaacataaaaagcaagcagctcctcctcatccccccgaacactgcaccaatcccaatcgtccggggaacaggagattccaattagagagctattaaattccaaattccgtgcagttaaattgctgaccatcaatgatcgtttcaatcagctcccaaaatcagaagctggggataaactagatagtgcaactcgtagttggagagatcgtttttgaagttcttctttatgtgggtgttagcagttctagcagcctaagtgttaagtgcttgacaatcggatactaaagtccagtgagccaaaaaaccagctattgatgactatatagagtattacctatcttgctactcagcttgtaatccgcacttagtcagcgtgttgcttaaataatgcttcaagctttaaccaatttggtttgtatccctatgtaccagaataccaatatatatcactgcttgcttagctctatttatacctatactctttttacctatatacctctttatatgtattatgtaaacgtttgtataattgtaagatgacaccgtcaccagttctgctccaactcatatttatttgcatgttttgttcgatattctataaagcaaataccctaaaatgaattcccaaaaaccatcccccgaccccatcttgaacacttttcgttcagtttcggccgacggccacttttcatttgatttgagttcgtcaggttttcctgggttttcccaagagtcagactaatttctctatgattttctctcgaatttcgtgtttattttgaacacaaaccaatactcttaccgcttcagttcttacaaaaaccaaacacaatcccccctaaaaaattaaaaaacagaaaaagaatttgatgtatattcaaaagcagttttgagcttcacataaaaaaaagcttgaccatataaataacaccaaaaaaaaaattaaattgcatacacaccgaatctgatttaccgagctgtgtgataacaaaccaccgtattttacagatgaacaccatcctgcacccacatttactcctccagagctacccaagcgggtgcatgtgcgtggatctgtatcgggtaaagtctcgtcttccagtcgaacgaacgaacactcaatttggtatcagtcagagatcacattcacagaaaggtcattttgaatcggaggtgtttaggtggatagcacagtaatccagccaaacagctacccacccagtctcacataacacacacacacatccacgctcaagatcaagataacattcttatcagttatcagttatcagtttgccccacgatttcgtttgccttggttcgcttgttcctcagttgaaaacgtaagagataaaaatgtatccaatccaatcgataacccattgataattgtttagatattcgtttgcataactctgtttttgcgttgattcttgaacagaactcgttccgctctgctaatgtaactcgttgatatactctctaatctaaagaaacgatatactatatatcttccgtattatcatatccacatatcgatgtctatttaccttaacatacttatttgtacacatcactcggtgtggctttgttttcaattgcataaacaatctgcttgttaccaattttgtttattactgtcgcaaccacacacagcatcacataatgacaagaactaagaactaagaaaccagtaacctaaacctaaaccaagtgcaacatgcaacacgcggctcaaaaatacctttctcgattaactaatgactaatacttaaagccaatgagtatctcttcacactctctgatcagcgtgacgaagctcttgccaagattactaatcgattgatctgctctctatctctgatctcgtcaaaaaacaacaacgcttctgccttgccaaatgccaaatgatacaaaacaaaaactgtcaatctgccacaggtgatatcactcgtgacagagaagatacgaatcgtaagtttcgatggtattgattacatatcattttcatgtgcgcaaccatctcttgtgattacagtactcaatcgcaatgtgcgccggccgaatggcactggcaacggtacgggtggcatgcaccacatgaacaacacggcagcggcggctgcggcagctgcggcggcgggaaaacaggtgaacaaggtgaagccaacggtgaatgtgagccggcaggtggagggccaagtgatatcgccatcgcagtacaacaggtaagccaatcgcacttatcctgcggggactgtacatatatatatatatatttataatatatatttaacatggggtggaacagcaggccatctacttaactatagagtttgatcacattaaacagcactctgttatcaaatcaaatatatatagcaaagcaaagtcggtaatcgagcaagagcaagcagcaagataactcaatgaatacacccactaggaaaactctgtttgcagctgcatcaagttttgattttccacttttccgttgcgttacaatcgaacaaaaaaaaaaaaaaaaaacgagagattatgttacactcaattatggttactgtgtttgccacactcgttttatttgacacaacaaaatggtcaggataaggataaggatgaataggtatctcgtacatatgtaaatgctctttaaccaactaatcgaaacacctcaactaactgtctctcactcacctgctcaaccactcaaccactcgctcactctcgaaaaaaacaaacaaacaaatcaaccaattattaacttttaaccagtctaaatgtataaaaacgaacaacatcttgtttcaggccaccagagaatgatgctaacccttatgcgggctatcaacttgcttacgaagttaaaaagctcatgtatgcgtccataatttcctagatttttaacttacaaactctatcgaaactaaaaaagccaaaagccttttctttaaccataccttagtattcgttaatacttatctaactacatcttatgcgcattttgtttgacacacattgatattgattgatcgaaagctatgccatattccatcaaaatcgcgtactaaacataatatgaattttaacaaatttgtgcgtttttttttgtcatgtcgctgtcttctgtgtctgtgtgcgtatgtgtttgtgcgtttgtatatgttggtgtgtatgtgtgagcgccccatgattattttgccatctaaactatccccagcataactaaccgcattccattctgaagcattctgtctactaacatctatctgccacccaaagtaaactaacaagtaacaactttactttgggtttaatgtttaagtaaaaagggttctaattctaaataatctttgaagcagctttttttaagaacttcttaaactctccttttgctgatttatttgccgtgctaatgtcttgtgtatattttaactgtacgcaaatatctatgtaagaaaagtgttttacaatatggatttccattagggaaacttaagatatttttaccaatcttgagaaaaggatcaatcaaatattgtagcgatcttttggcgcagactacgaaacttctaaaaaaaaatatttcaacttcttcttcgaaactcataaaactaagttggttctagaccacaaaagcatacattaagctcaataatcgcccatttttctcctgcattctatatctatttctctgaatcatttgaacttgaattgcaatctaagtgttgtatgtgtttttctgtgttcatctttgtatcaagacttgcacctgtgtaccatatattttatatttttacgattttttttttaattaagaagacacaacattaagtattgtagttgaaaatgccaagttcggcggatcggaagggttatggattaacaaaggccgctccctcgcgcatgccgagcacatgaatcacactgaaacacctggagggagttagccgaccacctaatacactagtttttgatccaaccatcccaaccgccgccggatggagctgttgagcattttgcgtagtgacacattgatttattctcaaatactttttcgcattcatttggagacttttgttattagcacatgatcttctctaactctctatctatcttactatccgtgtatttatctttgtaaacgtaaaactcttcttaactatctttaactattcgtatattgagatcacattttaattcaatatgccccaagtactcgtactcgtattgaagtattcacatcatttattgaacgaaacacgtactcgtagcgtttccgatgaacactttgcatttggatgtagcgtttgtttttgaattgaattggttgataaactgcatatgcaagtcaaaagttgaatcgaagtgaaacccattatgatcgaatcgaatcgaatcgaatccagctacagcacagaccgcccgatggctaactcctgtctctatcctatcgatctacttgtgtctaggccgacgagtcgcagttccggcacgggcacacagaatcaaaatggcggcgtatccttgcccgccggcattgcggacgaccagtcgaaggactttgatttcgagaagaccgaaatgaagtacgactcgacgggcatgttccactggagtccggcaaagagcttagaagactgcatactggtaagtctagtgcaatcactgctaattgaatgcggattgaaagttaacctgcacaacttctctataggatcgcaaccaggcggccatgaccgtgctgaacggccacgtggtcgtgtgcctgtttgccgatcccgattcgccgctgattgggctgcggaatctggtgatgccgctgcgggcatccaacttccactaccacgagctgaaacacgtggtcatcgtgggctcggtggactacataagacgcgagtggaagatgctgcagaacctgcccaagatctcggtgctcaacggatcgccgctgagccgtgccgacctgcgggccgttaacgtcaatctgtgtgatatgtgctgcatcctgtcggcgaaagttcctagcaacgacgatcccacgctggccgacaaggaggcgatcctcgcctcgctgaacatcaaggcgatgacctttgacgacacgatcggtgtgctcagccagcgcggcccggagttcgacaatctgagcgccaccgccggcagtcccattgtgctgcagcggaggggctcggtctatggcgccaatgtgcccatgataacaggtaaactgcatcgcactaagttggccgagtttgcgaacgaccgaacgattgtgaggctggccaggatttggacgtgggtgttggcatggggggggggggggttgaactgtaggggtgctgctgggttggtgggtacatcctatgtcctggccaggctcacccgctttctgctccgaatgcggttcaagtgtgtgctctactaatgcttcacatgttggttgtcgtttaaagaactggtcaatgatagtaacgtgcagtttctcgatcaagacgacgacgatgatccagatacagaactctatctgacgcagcctttcgcctgcggcacagccttcgctgtgagtgtgttagactcgctgatgtccacggtaatgtccttgttttagtcattgaaagggtctcgtcccctcttggctccactgttctctttgcttatatgtatatactttcgattgatccccaactgtatagacttacttcaatcaaaacgccttaacgctgatccgctcactgataacgggcggcgccacgcccgagctggaactgatcctggccgagggagctggcctccggggaggctacagcactgtggagagtctgagcaatcgagacaggtaggtggtgggatgcgattgactcaatatcaacggtgactatttttgactattattgactattatttttaccatagatgtcgagtgggtcaaatctcactgtacgacggtccgttggctcaatttggggagtgcggcaagtatggggacctatttgtggcagccctcaagtcgtacggaatgctgtgcatcggattataccgattcagggacaccagctccagttgtgatgcgagcagcaaacgttatgtaataaccaacccacccgatgacttttcactactgccaacagatcaggtgagcttcgttataggtatacattattattccaatatacaatgtgcattatataggtattcgttttaatgcaattcgatccgggcctggagtacaagccgccagcggtacgagcacctgcaggcggacgtggcaccaacacacaaggttccggggtcggtgggggcggctccaacaaggatgataactcttgattgttactgtgtagcgccttaactgatggtccttattcgtacatttgaacgatggagaagctaaacgaaggcagagcagcgcatttttggcaacgcatccacaactacatattggcataagatatttgatactcgcgacaaggcgacaacaaatcggcagcgaaaaaaagacatatttgtatgtaaatcgattgtaccgtgtacaaaagtgaaatcaaaagcgttaataagttagagattacgaccataacttgcgtgccattaaatgcgctgctctgctcttttatgtgtgtggggggatgcggctcggtgtattttgtccatcccaactaacaatcaagagacaaccggaaccggaaccactgaccaccagatcaacgtcgacggcaatgccgcctgcctccacacacataaaaagctaatccggatcgggggaccaagaactttagccctgatatccatcgttcaactgccaactgattgcttcccacatcattccgtatgcctttttagaaccttgaaattatcatattctgtatatctataattttagtcttgcaactacattggttgattttgtatccttgtttatccctattattttgtaatcaacattgtgtgccccaataaaatattcttattattattatttaatttttaagttggttttgtcatttggttcgaccccaatttcgttcttcaagcaacaatcattagttatacttataggtatgtatttacgtatgagtgctgtcgactatcatttacattaacatttacattacatttatatttaagaatcatttaccactaattttcgtttacattttgagttaacttcatggcgctatcattgcataagaaacaattgaaaattgaattctaaacgaaaatccatcttaatggtgtgacgtaagcaattgggaaccattagtgaggtaagctacacattaaacaaggaaacaaggaaaactgagcgaaaaacaagaaactaccaaaaactacaaactaagtctactcgatctgtgtactctcatgtctcaaaatctatctctaagtcgctgaatgcggccacaacgcaacaatttatatcgaacacaccaattaaacactgcaaacaatgcattgcggattgcttttggctgagatacagatactgatagcgagatacagatacaaggcaatgaggctaaaattcaaaaactgcatttagaagtttctgagcatgcg

SEQ ID NO: 42815 - DNA, 3758 bp, DROSOPHILA
atggcaagcggtttgatcgacaccaatttcagcagcacattggcaaatgggatgtcggggtgtgatcaaagcactgtcgaatcattggccgacgatccaacagattcaccattcgacgccgatgattgtctcaaggtgcgcaagtactggtgctttctgctgtccagcatctttacattccttgctggcctgctcgtggtgctgctatggcgagccttcgcattcgtttgctgccgcaaggagccggacctggggcccaacgaccccaagcagaaggagcagaaggcatcccgcaacaaacaggagttcgagggcacctttatgacagaagcgaaagactgggctggagagcttatctcgggtcaaacaacaactggtcgaattttggtcgttctcgtatttatactcagcattgcatccctcattatatactttgttgatgcatctagcgaagaagtcgaaagatgccaaaagtggagtaacaacattactcaacagatcgatctcgcattcaatatattttttatggtttacttttttatacgattcatagcggcgtccgataagctttggtttatgttagaaatgtacagttttgtagattattttacaatacccccgtccttcgtatcaatatatttagatcgaacatggatcggtcttcgatttcttcgagcgctacgtctcatgactgttccagatattttacaatatttaaacgtactaaaaacatcgagctccatacgcttggctcaactagtatcaatttttatatccgtgtggttaacagcagcgggcattatacatctgctggagaactctggcgatccgctggattttaataatgctcatcgtttatcgtattggacctgtgtctatttcctaattgtgaccatgtcaacggtaggatatggtgacgtttactgtgagactgtcctgggaagaacatttctcgtgttctttctgctcgtcggcttggcaatgtttgccagcagtataccggagataattgaactcgtcggtagtggcaataagtatggcggtgaactgaaaagagaacacggaaagagacatattgtggtatgcggtcatataacatacgaatccgtgtcgcatttcctgaaggacttcctccacgaagatcgggaggatgtcgatgtcgaagtggtctttctccatcgtaaaccacccgatttggaacttgagggtttgttcaaacgtcattttaccaccgtggagttcttccaaggaaccattatgaatccgatcgatcttcagagggttaaggttcatgaagccgacgcctgcctcgtgctagctaacaaatattgccaagatcccgacgcagaagatgctgccaacatcatgagagtcatctcgatcaagaactacagcgacgacattcgagtcatcatccagctgatgcagtaccacaataaggcatacttgctgaacataccatcatgggattggaaacagggcgacgatgtcatctgcctggccgaactgaagctgggcttcattgcccagagttgtttggcgcccgggttctcgaccatgatggccaatctgttcgccatgagatcgttcaagacgtcgccagacatgcagtcttggacaaatgattacctgcgcggcactggcatggaaatgtacactgaaacattgagtcccacatttattggaataccatttgctcaggccactgaactgtgtttctccaagctgaagcttctgctgctggccatcgagatcaagggcgcagaagagggggcggacagcaagatttccatcaaccctcggggggcaaaaatccaggccaacacccagggtttcttcatagcacaaagtgccgacgaggtgaagcgtgcctggttctactgcaaagcgtgtcatgaggacattaaggacgagacgctgatcaagaaatgcaaatgcaaaaacttgactgttcagcccaggagcaaattcgatgacttaggtgatatcactcgtgacagagaagatacgaatctactcaatcgcaatgtgcgccggccgaatggcactggcaacggtacgggtggcatgcaccacatgaacaacacggcagcggcggctgcggcagctgcggcggcgggaaaacaggtgaacaaggtgaagccaacggtgaatgtgagccggcaggtggagggccaagtgatatcgccatcgcagtacaacaggccgacgagtcgcagttccggcacgggcacacagaatcaaaatggcggcgtatccttgcccgccggcattgcggacgaccagtcgaaggactttgatttcgagaagaccgaaatgaagtacgactcgacgggcatgttccactggagtccggcaaagagcttagaagactgcatactggatcgcaaccaggcggccatgaccgtgctgaacggccacgtggtcgtgtgcctgtttgccgatcccgattcgccgctgattgggctgcggaatctggtgatgccgctgcgggcatccaacttccactaccacgagctgaaacacgtggtcatcgtgggctcggtggactacataagacgcgagtggaagatgctgcagaacctgcccaagatctcggtgctcaacggatcgccgctgagccgtgccgacctgcgggccgttaacgtcaatctgtgtgatatgtgctgcatcctgtcggcgaaagttcctagcaacgacgatcccacgctggccgacaaggaggcgatcctcgcctcgctgaacatcaaggcgatgacctttgacgacacgatcggtgtgctcagccagcgcggcccggagttcgacaatctgagcgccaccgccggcagtcccattgtgctgcagcggaggggctcggtctatggcgccaatgtgcccatgataacagaactggtcaatgatagtaacgtgcagtttctcgatcaagacgacgacgatgatccagatacagaactctatctgacgcagcctttcgcctgcggcacagccttcgctgtgagtgtgttagactcgctgatgtccacgacttacttcaatcaaaacgccttaacgctgatccgctcactgataacgggcggcgccacgcccgagctggaactgatcctggccgagggagctggcctccggggaggctacagcactgtggagagtctgagcaatcgagacagatgtcgagtgggtcaaatctcactgtacgacggtccgttggctcaatttggggagtgcggcaagtatggggacctatttgtggcagccctcaagtcgtacggaatgctgtgcatcggattataccgattcagggacaccagctccagttgtgatgcgagcagcaaacgttatgtaataaccaacccacccgatgacttttcactactgccaacagatcaggtattcgttttaatgcaattcgatccgggcctggagtacaagccgccagcggtacgagcacctgcaggcggacgtggcaccaacacacaaggttccggggtcggtgggggcggctccaacaaggatgataactcttgattgttactgtgtagcgccttaactgatggtccttattcgtacatttgaacgatggagaagctaaacgaaggcagagcagcgcatttttggcaacgcatccacaactacatattggcataagatatttgatactcgcgacaaggcgacaacaaatcggcagcgaaaaaaagacatatttgtatgtaaatcgattgtaccgtgtacaaaagtgaaatcaaaagcgttaataa

SEQ ID NO: 42816 - protein, 1175 aa, DROSOPHILA
MASGLIDTNFSSTLANGMSGCDQSTVESLADDPTDSPFDADDCLKVRKYWCFLLSSIFTFLAGLLVVLLWRAFAFVCCRKEPDLGPNDPKQKEQKASRNKQEFEGTFMTEAKDWAGELISGQTTTGRILVVLVFILSIASLIIYFVDASSEEVERCQKWSNNITQQIDLAFNIFFMVYFFIRFIAASDKLWFMLEMYSFVDYFTIPPSFVSIYLDRTWIGLRFLRALRLMTVPDILQYLNVLKTSSSIRLAQLVSIFISVWLTAAGIIHLLENSGDPLDFNNAHRLSYWTCVYFLIVTMSTVGYGDVYCETVLGRTFLVFFLLVGLAMFASSIPEIIELVGSGNKYGGELKREHGKRHIVVCGHITYESVSHFLKDFLHEDREDVDVEVVFLHRKPPDLELEGLFKRHFTTVEFFQGTIMNPIDLQRVKVHEADACLVLANKYCQDPDAEDAANIMRVISIKNYSDDIRVIIQLMQYHNKAYLLNIPSWDWKQGDDVICLAELKLGFIAQSCLAPGFSTMMANLFAMRSFKTSPDMQSWTNDYLRGTGMEMYTETLSPTFIGIPFAQATELCFSKLKLLLLAIEIKGAEEGADSKISINPRGAKIQANTQGFFIAQSADEVKRAWFYCKACHEDIKDETLIKKCKCKNLTVQPRSKFDDLGDITRDREDTNLLNRNVRRPNGTGNGTGGMHHMNNTAAAAAAAAAAGKQVNKVKPTVNVSRQVEGQVISPSQYNRPTSRSSGTGTQNQNGGVSLPAGIADDQSKDFDFEKTEMKYDSTGMFHWSPAKSLEDCILDRNQAAMTVLNGHVVVCLFADPDSPLIGLRNLVMPLRASNFHYHELKHVVIVGSVDYIRREWKMLQNLPKISVLNGSPLSRADLRAVNVNLCDMCCILSAKVPSNDDPTLADKEAILASLNIKAMTFDDTIGVLSQRGPEFDNLSATAGSPIVLQRRGSVYGANVPMITELVNDSNVQFLDQDDDDDPDTELYLTQPFACGTAFAVSVLDSLMSTTYFNQNALTLIRSLITGGATPELELILAEGAGLRGGYSTVESLSNRDRCRVGQISLYDGPLAQFGECGKYGDLFVAALKSYGMLCIGLYRFRDTSSSCDASSKRYVITNPPDDFSLLPTDQVFVLMQFDPGLEYKPPAVRAPAGGRGTNTQGSGVGGGGSNKDDNS

SEQ ID NO: 42817 - DNA, 3434 bp, DROSOPHILA
tgctgagaatcctgcgggtggtccaactgttgctgagtgcgagcaaagtgcgtgtgcctgacatttcaacgaagccactttggcaaatcacttggctgaatcaacagatttatacgccatgccaacggctctgctttcgattttaatgcgctgggtgctccacccacacgccagccaacagccaccagccaccagtcgcccaactacccacccacattatgctgctttacgggtggctggagttcgggtcgattgaggcgaagaatactacaatttgatttatgaccatcttgagttgcgaatgaatgcgaaagtattctccgcttataggggtcgaatggcgcctttgagagggggattgcataaacaggcatcatatggggtaaacaagggccgagataagcgagcgggtgtttggtgtacacatcacatcgctgagcttcaataggtcacgtattttgtctaaatctatatgatatgggcaagtgattagattcgttttaggatcgatctgtaattaattgggaaagtaaaagtaaagtaaaaagaaagtaaaagttcataaattaaataacatttcctgcataaccataaccacactcaatttaaaagcccactcatgtagggattatcatttattgtttgttcacataatgaaattttcttacggtctgtgtttctttcaattactggagttgttttaagcccggtgccgatcttaaggaccaattcagcaggacgcgcacacgaacgactcaaacggaaacaacaaaagttgagccgcattcggagcgcacactgcgaccggatttcgaacccgatcgggaagataatggaaaaaccgattacatgagacaaattttggttgtttcgcttagtattctccagtcagtcgggcgcgaacgctttagagtagtgcatatttcagcagaaacaaaatcgaaaagtacttagtaaatgctataggtagttacaacttaacggaactagatgcacccagctactgcgcgatggtcgatggcagattgagcagcgtgctctgtccgctgggcaagtaggcgacaccacgggaccgggatagctggtaggcgatatcctcggcggcctcaatacgtcgcagctccaccagaccgtctccggcctcgccgaatgacttggccaacaggccagcggcttcggcatcaccctccgccgaaatgatggacgccagcttctgttgctcggccttctccacgacaaaacgcgccttctccgcctcctgctgggccacctgcttcatctcgacggccagcgtgaactcccgaccgaaggtcaagtgcgtgagcgagatgtcatccagaataaagccgaactgcttggcacgtacagtcagttcctgggaaacgcgctgcgacaccatctgcaaagaggtaatcacgttaagtacgggcatgaaagtattatatttccgactgcataagttgaataataatccaattcttaagcttcaattctcaaaagagcaataagcctagacttaagcgccgagatcgcgttcttgcttacacaatcaaatttaaatcgaaaataaaatacgcgtgaaatacgatgagatctgatgacctgatactaagtaaacataagcgcctctggtgaaacacaaggcccatcaaaaaagctttatcctaaagaaactgagggctctcctgatgtttttactcacctcacgctgggtgatcagctcgccggcgtcgaactgggcgaccacagccttcagcacctcaggcgcgatggagggcaggacacgctcgtcgtagtcctggccgagaatggtgtagatcttgggcagctggtctggaatggggcggtacaggattcggagcgtgatgttgacattctgcagatccttgctgcccgttatcacaggaacgttgcggggctgggaccggatgtcgaagatgatgggccgctgcacccatgggatgaagaagtgggtaccctcgccgaccacgttctccttgatgccggtgaagcgatcgaagatgaccgcccggtggccgccttccacattatataatgccgaattgacaacgccacccaaaacggccactccgaggcccatttggccaatgcgattaaagaactgagcagccattatcctttgaataaaacaaacgtaatgtatttagttactgttctataaactatatatgtaaatgaaagccgactggacttggaaatttcatcagtttttaggttagaacgtcatggtttaatgacaatgtgctgtttgcgtgtttttatcccctgttcttcctggtcttcaaacgcagttagctcggctcgctcatagactcacttgttaaaggtttttggttgcacttaaattaaattattgtgcaattttgctctttgaaatgcaaaacacgaaatacaaccacacggcctgttatcgataatacaactgtcggtggggccgccatatatcgaaacgtactaataagaatcgtattcgattgtttcctaagattatcgattatcgaaatttaaaaagaataataataaacaaagccagtttacaatatcaaactacaaatggtgaaatttacaataaaagtttattattaattgaaaactaaaaaccccctcaaaattattgcgccatttcggctcgcccggcgacttttggcatcttcttgttcgtcgaatcctccagctccttggccttgtagtagtgcggagccacctccagcaaccacttgctctcgatctctataacctgacgcatgtactccttggaggtgaacaccagctcgtgatagagcacccagcgcggcagctcctcaaagagcgaggagttcggatgtatcatcacggtctgattgtgcttgatggtcttgtagtgaccgcccttcgagagtcgcgccacatggtaaaagtaaccagcggtggctgccttgcgcacgtttactgtttctggcaggcagctgaccatgtcgatctcgacacgctgcatcagtcccaccagctgctcccgcacgtcgcgagcccgcttcatcgatctgtactggatgaagttctcgtagcaccactgggtgctgtagtccgtctccgcccactgattgtagacctgcaggaggctcaagtggtcgccgtgcatgtgattgaagttttttcgggctgtgtccgcgtgaatgattttgtccttgggcctgtagaaaatggcgctattcacggacagcatggctgcaatggtcaccatctcctcggagcatttgtatctaaaacaaaaatatacgaatattatacgaattatttcacttctggtttgttagatcgattacatacttttcgcttgccagcagcatcttgcccatcatgggatccacgggaaactcggccatccgtcgacccagcttggttaactctccatggtgattaagtgcacccagggc

SEQ ID NO: 42818 - DNA, 931 bp, DROSOPHILA
cgataacaggccgtgtggttgtatttcgtgttttgcatttcaaagagcaaaattgcacaataatttaatttaagtgcaaccaaaaacctttaacaagataatggctgctcagttctttaatcgcattggccaaatgggcctcggagtggccgttttgggtggcgttgtcaattcggcattatataatgtggaaggcggccaccgggcggtcatcttcgatcgcttcaccggcatcaaggagaacgtggtcggcgagggtacccacttcttcatcccatgggtgcagcggcccatcatcttcgacatccggtcccagccccgcaacgttcctgtgataacgggcagcaaggatctgcagaatgtcaacatcacgctccgaatcctgtaccgccccattccagaccagctgcccaagatctacaccattctcggccaggactacgacgagcgtgtcctgccctccatcgcgcctgaggtgctgaaggctgtggtcgcccagttcgacgccggcgagctgatcacccagcgtgagatggtgtcgcagcgcgtttcccaggaactgactgtacgtgccaagcagttcggctttattctggatgacatctcgctcacgcacttgaccttcggtcgggagttcacgctggccgtcgagatgaagcaggtggcccagcaggaggcggagaaggcgcgttttgtcgtggagaaggccgagcaacagaagctggcgtccatcatttcggcggagggtgatgccgaagccgctggcctgttggccaagtcattcggcgaggccggagacggtctggtggagctgcgacgtattgaggccgccgaggatatcgcctaccagctatcccggtcccgtggtgtcgcctacttgcccagcggacagagcacgctgctcaatctgccatcgaccatcgcgcagtag

SEQ ID NO: 42819 - protein, 276 aa, DROSOPHILA
MAAQFFNRIGQMGLGVAVLGGVVNSALYNVEGGHRAVIFDRFTGIKENVVGEGTHFFIPWVQRPIIFDIRSQPRNVPVITGSKDLQNVNITLRILYRPIPDQLPKIYTILGQDYDERVLPSIAPEVLKAVVAQFDAGELITQREMVSQRVSQELTVRAKQFGFILDDISLTHLTFGREFTLAVEMKQVAQQEAEKARFVVEKAEQQKLASIISAEGDAEAAGLLAKSFGEAGDGLVELRRIEAAEDIAYQLSRSRGVAYLPSGQSTLLNLPSTIAQ

SEQ ID NO: 42820 - DNA, 5502 bp, DROSOPHILA
gcgtgctcaaaagctttgcgggcgttctgtttcgacccacgctgccgctggacaagatgctggctatacgcaacctcggctttggcaatcccctcaagatatatctctcctacaagaagcccattgggcgttggctaaagggaagcctgcggccactgggaacgcttctgaatccttccgtggagcagcaacccgaacgcaactggacgcagcaggtcgtggagatcagccaggtgcccagcagtcagcatgtgctggaggtgcatgtgggtggcggatactacgaggagatcgagaagctgcccgatgaggagctgctggagcagataactggtctgctaaggcgctgcgtgagcagtcacctggtgccgtacccacaggaactgctgcgttccaactggagtacgtcggcctgctacctcggcggtcgtccttacttctccaccaacagcagtgcccgggatgtccagcgactggccgctccgctgggcgagaagtcgcccggtctgctctttgctggggatgcaacctcgttgagaggctttggaaccattgatgccgccaggtccagtggcatccgagaagcccaacgcattattgactactatctgaaaagcgtgcactgcggttaagtgcaatgggaaatccgaatgggctgctaaattgtacagtgtatatcaacacgaaaactagtcaaaatttatagttacaattcgtttgtatttttaagcagaatacatttgttttaattaggcgcataacgttaacaataaaaatcatgaacaacatcaatgatacaatgataggatactataaatataatgtagcgatggacgaaccatcttttgttgcgatgtaaattccctaaacatgtcgcaagtggaaagtgtatggtctgttccgggttccaagtcacaatgcattatatatcatactggtccaatttaagtttactatattaatttatatactaaacacggaacagacctgcacaaccactttactgctcctgttccatctcgtcggcagcggcgctgacctccttccacgagtactccatgtcctcggactgggtgaatcgcgagcaaatggccatgcgcaggaagtagacatccttgatcttggcgggaaccaagtggatgtggccgcgtccattgattcgcttgagaagagcttcgttccgctcgttgctgcccttcagccggaagcagaccaatcccatattgatctcggcggccagttcaaatctggagtccgccacgcagagatccccgaactgcttggcaaagttgcagtgtctgcggatgtgggcctggagattctcgacaccgtacagccggaggacgaaccagagcttcagtgccctgaatcgccgtccaagtgggatttgccagtgacgatagtccggagctgatccctgcatgtcgtgcttcaggtaaagagggtccacattgaacgcgttgaccacccaactgggatccttcagccacatggccgagcagtcaaagttcaccagcatccatttgtgtggattgaaattgaaagagtctgctgattcgatgcccttcatcaggtggcgatactcggggcaaatgaaagcggatccggcataggcagcgtccacatggatccacaaattgtgcttgtttcccaccggtccacactcatccaagtagtcgaaggcgcaggagttggtggtgcccagggtgaccaccgcgtagaagggaatcaaaccctcggccacatcctgttcgatggccttttccagggcagcaccacgcattctgtgattctcggactgcacggaacggagctttactccgcccagaagaccagcccgctccacggatgagtgagcctggtccgagcagtagcccaccaacttgcccaagatggtgtgctcatcccactccggatggagctccttcacctccttcaacttcttggccttggctcccagcagagccaccagtgtggactcactggccgtgccctggatgacaccgccacccttgccgcccgaacaggccaggaactctgccggcagctccagcatcttgcccagccaatccatcatgaccacctcgagttccgtgcacgcgggactggcgatccacgtgaatccgatgcaggcaatcgctccactcagcatgtccgcaacgatcgctggatacgagttggccgtggggaagtaggcatgaaacttgggactgtgccagtgtgtcacgcccggcatgatgactcgctcgatgtcctgcatcacatcctgccacttctccggcttctcgggcgcagcatccggaatcaatggcttcaggtagccaggcttcacttccggcagaacgcgcctgtaattgcgaaaattgcgttagcttctgattgcattttggcgcccattcagtaaaagctccttgctaattggctgcgaaactcagttagccaacaaaggcatcaggaatcattggggttgaaggacacccatccaaccacccccaacttgttgccactgccatgaaaatcaatacgaatatgtagcaaattgctatgggaacagaatatagatagagaggcaatgctgataatgatggtgggattttctatcctttcaattaaaaggaagtactactaagaggtgaaaaaagaaaataaaaagataatttctctatatatatgtatcttcaattaacaaagattcgtttaaaaagttatctaactaagaaaatagttttgaaacttcaatgtcgaaggaactttaataaagcaaaatgaattattatattacgctctacttaagcttgattttcaattaaccattaatttcagcgactgtcgatgggcaaacaaactcagcagctgtagtaagaaaattgtttacttagctgactttgattttcaaggtaatggaaacgaagccgttagaagaattgcccaagaatagtgaaatacccgaattgcttttggccaaggcgttagcagtgcaattatatctatactcgtatacatgaaaaacgaccttgacacgccaactcaacaaagccatttaattaattagttttcggcccaagagcagcgaaagtacttggccctcgagctaatgggaaggtcgcctcaaccccctaaacaaaatgatatatatatatagatatatatagcaatggaaatgtccgatcggtgcgactttcccgtgactaatctcaaaacgtgtgcgaaatgtcattcacttgcccggggattcgaatcgagcagaacgaactttcgattcgaacgtaaaatgctgaggtcaagcgactgattctgataccatataaatgaaattcatacgctaaattaagtttaattcaagctaattgagtagggagtcttaatctggctcacctttcgcgtatattctccagatattcggctataaagtcgaccattgtcttggcaaaatccttgaactccggcgcctccatgtcgatcttgatgtggatgcaaaagtatttggttatcagacgtgcataattgttggctctatacctaaacccaatagacataccgaaaccttgggatccagcttatccggcgaaatgttagctttaccattaccatcagtttgttttgttggaattgtgttactaatgggtatgtggctcatttcagagatttacttttcgtttgacttttgcaatgatatgaactcgaatggttagagctaatatgaaagaatgtgcgattattgaaagtgttattaatagaagtgcgtttttgaagatagtgctaatcagtgcagcagctcaaacaaaaaatgctatcgctgcaaacacgacaaatgaacgacattgaatactaattacttgataggcaaaacgatgatgataatagttataataataaggtattaaggtattaatagtttaaagcgttttcccatcgagtgcgctgcttaagtataggctgtgaattagtatggtaattagaatgtttaatgcattcttgcattaatcaagactgctttattttttttttttttctaaattccaattttaacaacgtaaacaagttggcattgagacgacgacttgttgccagctaaaatcttattttaatagatacacaaaagcatgcagataccgaaagccgagaaaagcttaagcactatagaattcggggcccgaactatcaaattgaaccgaagcaaggctatagtatatgcccagttttagatacacattacgtatacgcagcgttagccccgaaatgaatctttcgcatgcacatgcactcattatgttggccaagcacttcaggcagctgaggctgttgaggagccacactttcgtctctcaccgttgcactttagttaactgcttttaattgtttgcacttgttgccgagctttacttccgttccgaactaaatctttgctccaagttcagtttgccctcctggtttagaacagctaatatttatttgctgatatttcgatgctgatatttcggtgctgattgctgtgcgcttggcgttctcctcttaactgagcgctgcccgctcttggccatggcttttaaagcccgtccagcagcgctgccaattccgcaggaccggttcaatcgcagtccgcagccgctgaacttcgaatcgcagccgctgtcgtaaaaacaaattcagctctcgtttgatttgtgcacgttttttgacacttttttggaacatgcattaattgggcgctgaatcagtaactggatatcaaaggctttattttccatggatttatttagaatttaaaaaaatatatatatatacatacatgcaagctattacattttatttgccagctctgtgaacttaatttgattatttttgaaattagtttgagaacctagtgatatttaaaacagcaagcaaaacattttgaattctactcacgtgcttcccaactcgaatttgtggaaagagagcgatctcgtcaggaatcccccaattatgagtcactcgaaacagggtttttcttggactccccgaagaaaaaatcacgcaaaaaaatgtaaacaaagttatattcgtaggaaagacaagaaattgattaagccgtggaatggcacgctttacgcgcatcttggaaaccggttattagagcaccacatatgacgtgctttttgaaccgctcatggaattgtgacgtcaaataatccaatgctctcactcactttcgcattgtgctaggggaagtgggctaggttgagccttttgagcgggcagttccgcatacactgagaaaaattcaaaattactatagaaagctaacgacttttggatgccagttacttggccggaatttcaaaattcagttgaaatatcaatagaaattggcaagaaacaataaatatgtggcttaaatgtttatgccaaatatatcgagagatataatacaaaaattcaaaatatttttcaaaactgttttcgtgaccgttttttttttttaaagttcccaaaatctcgaagtttatacggacagacaaa

SEQ ID NO: 42821 - DNA, 2475 bp, DROSOPHILA
ccaagcgcacagcaatcagcaccgaaatatcagcatcgaaatatcagcaaataaatattagctgttctaaaccaggagggcaaactgaacttggagcaaagatttagttcggaacggaagtaaagctcggcaacaagtgcaaacaattaaaagcagttaactaaagtgcaacggtgagagacgaaagtgtggctcctcaacagcctcagctgcctgaagtgcttggccaacataatgagtgcatgtgcatgcgaaagattcatttcggggctaacgctgcgtatacgtaatgtgtatctaaaactgggcatatactatagccttgcttcggttcaatttgatagttcgggccccgaattctatagtgcttaagcttttctcggctttcggtatctgcatgcttttgtgtatctattaaaataagattttagctggcaacaagtcgtcgtctcaatgccaacttgtttacgttgttaaaattggaatttagaaaaaaaaaaaaaataaagcagtcttgattaatgcaagaatgcattaaacattctaattaccatactaattcacagcctatacttaagcagcgcactcgatgggaaaacgctttaaactattaataccttaataccttattattataactattatcatcatcgttttgcctatcaagtaattagtattcaatgtcgttcatttgtcgtgtttgcagcgatagcattttttgtttgagctgctgcactgattagcactatcttcaaaaacgcacttctattaataacactttcaataatcgcacattctttcatattagctctaaccattcgagttcatatcattgcaaaagtcaaacgaaaagtaaatctctgaaatgagccacatacccattagtaacacaattccaacaaaacaaactgatggtaatggtaaagctaacatttcgccggataagctggatcccaaggtttcggtatgtctattgggtttaggtatagagccaacaattatgcacgtctgataaccaaatacttttgcatccacatcaagatcgacatggaggcgccggagttcaaggattttgccaagacaatggtcgactttatagccgaatatctggagaatatacgcgaaaggcgcgttctgccggaagtgaagcctggctacctgaagccattgattccggatgctgcgcccgagaagccggagaagtggcaggatgtgatgcaggacatcgagcgagtcatcatgccgggcgtgacacactggcacagtcccaagtttcatgcctacttccccacggccaactcgtatccagcgatcgttgcggacatgctgagtggagcgattgcctgcatcggattcacgtggatcgccagtcccgcgtgcacggaactcgaggtggtcatgatggattggctgggcaagatgctggagctgccggcagagttcctggcctgttcgggcggcaagggtggcggtgtcatccagggcacggccagtgagtccacactggtggctctgctgggagccaaggccaagaagttgaaggaggtgaaggagctccatccggagtgggatgagcacaccatcttgggcaagttggtgggctactgctcggaccaggctcactcatccgtggagcgggctggtcttctgggcggagtaaagctccgttccgtgcagtccgagaatcacagaatgcgtggtgctgccctggaaaaggccatcgaacaggatgtggccgagggtttgattcccttctacgcggtggtcaccctgggcaccaccaactcctgcgccttcgactacttggatgagtgtggaccggtgggaaacaagcacaatttgtggatccatgtggacgctgcctatgccggatccgctttcatttgccccgagtatcgccacctgatgaagggcatcgaatcagcagactctttcaatttcaatccacacaaatggatgctggtgaactttgactgctcggccatgtggctgaaggatcccagttgggtggtcaacgcgttcaatgtggaccctctttacctgaagcacgacatgcagggatcagctccggactatcgtcactggcaaatcccacttggacggcgattcagggcactgaagctctggttcgtcctccggctgtacggtgtcgagaatctccaggcccacatccgcagacactgcaactttgccaagcagttcggggatctctgcgtggcggactccagatttgaactggccgccgagatcaatatgggattggtctgcttccggctgaagggcagcaacgagcggaacgaagctcttctcaagcgaatcaatggacgcggccacatccacttggttcccgccaagatcaaggatgtctacttcctgcgcatggccatttgctcgcgattcacccagtccgaggacatggagtactcgtggaaggaggtcagcgccgctgccgacgagatggaacaggagcagtaa

SEQ ID NO: 42822 - protein, 475 aa, DROSOPHILA; identical to SEQ ID NO: 25836

SEQ ID NO: 42823 - DNA, 2888 bp, DROSOPHILA
caataatatatatgctcggcatttataaataaatataaaaattaagtaacaccaagggtagtgaactgttacgaaacgttgcccaacactggtcctattggagcaatatttaaaaattcacttcgttcaattagaaatttaaagttacgaaaattacatgctaattcacatagaaacttggaaggaaattattacaattaaattttctaacgaatttgatttaatcgagtaagaaaagtaaatagtttaagccatctgtttagaatatacctgtaaaggatatttactattgtttgctatatttatgggttctaaaaataccgatttttaagaaaggtattctggcatggtttccccaaataagacattatataggatctttggaactcaccggatatttcgtctgtagcacgactccgcatatctcgtcgccgacgaggaactgctccccgagcatcgccatacaaacgttctcccaggcccggtcgaccttgttcttgcgtagtcgtatcaaccactggccgcccttgctgttcgccgggtcctcccacatcggtatgatgccctgcttgaagaggaggagctcccggtagggcttcagggcggtgggccggatgaggtgcgagtagagcgaccaccactgctgcacgctggcgcaccggccgaccatgtgcagcgacttgctgtagtcggcggccgcgcgctgcgtctccttgcgagagaaccagaggcagtatgtgtgctgcagccggttctcgccgggacccacctccagtggtggcaggttgtccacatctatctgattatccacatcgctgtcgtcgctgtcgacaatatctggccagtttttcctgtaacgcgagtacatgacacacaaaatagattttgattagtatgtcaaaggctgtatgtagatcaaatttgacatttggttcaccaaatgacacaaccgccgcactttcacataactatcacaaattctcgcagccaaattaagtttaacaaaacaaaaacgatgaagctgtctatacgcatgctggaccaacgcaccatcactttggagatgaacgaatcgcaggaggtgagggctctgaagcagaaattgggcaatttacccgaagtcgccatgcccgcggagaaccttcagctgatatacagtggccgcattatggaggatgccatgcccctcagtgaatatcgtatagccgaggacaagatcattgtgttgatgggtaagaagaaggttgataagagctcgccagaggagaaggttgccccgacaccaccgttggccgctggcccaaatgttttgcgcacagaggatgtggtgccttcactagctcccaatgatcagtgggtgagcgatctcatgtcaatgggatatggcgaagaggaggtacgctcagccctccgggcgagctttaatcatccggaaagggctatagagtatttgattaatgggattcctcaggaggttgtttcagagcagggattagctgcaatcccgagcgtacagacaagtgatcaattgcagcaattaatggcagatcttaacattacacggatgcgtgagatgattaatcagaatccagaactaatacacagactaatgaacagactggctgaaaccgatccggctaccttcgaagtctttcagcgtaaccaggaggagttaatgaacatgatttcaggcggcgcaagtcgcaccccgaacgagattgaacatttacagattactttaaccgccgaagaaaccgccgccgtagggcgtttggaggcactgggtttcgaacgtgtgatggccgttcaggcctatctggcctgcgacaaggacgagcagctggccgcagaggtactaatacgccagtcagaagaggatcgagactaataaagcgattcggagcacgtaaatgcacccagaacataacctaacaattttccaagtaaagatggtgctggcccagttttgttgctggctgggattgtggttgtgtgtggcaggcggtgcgcgtgggtggcggaggtgctccacttacgtctcgtactgcttgttggctactttctccatgctcatcctggcaattatgatgctgactggtagctgatactggtgctctcctgctgactgcttggctgttcctgtggcgctgttccaacctctggaacgagtacctgtggatccgggtgtttgcactactagattctttatgctgctgcttcttctggcgcaattcttcttttgctccttggctgcgcgtgtgtgtgttgtgtgtgtgtgtgtgtgtgggcaaatgggtttttggtggattctcttatgggcgattttttggggcagccgctttttcggggagcggttcgctacgggtccgccgctctctctggtaaacaatcgtatttcctgtgccttatcctttccggttatcagtgggtttgcttattttttggccgtttagttttggttcgctcgactttagtttgacgtttctttttgtacacaacacaacatgcgtccgattaagttccacttgctatccacattccacgcggcgctgtcaaaatcgaccagtgctgtaggtcgaagaagaattttgacattggccagcactgcacgtagtgcagttacataccctactgaagtgggtatatatgtttcattaatttcattaatttttcaactcgagttaaattgattaatttccgttgtttgttagggaaattaagtgactcaaataccaacatttatttcaactccaataattataaaaatttactttataatgtaatcaataataaaatgaataattacataaatagtaaacatatattccaaaatattttttaagaatgcagcaacaccgctgacacaacataccccacatttggttaca

SEQ ID NO: 42824 - DNA, 888 bp, DROSOPHILA
aacaaaacaaaaacgatgaagctgtctatacgcatgctggaccaacgcaccatcactttggagatgaacgaatcgcaggaggtgagggctctgaagcagaaattgggcaatttacccgaagtcgccatgcccgcggagaaccttcagctgatatacagtggccgcattatggaggatgccatgcccctcagtgaatatcgtatagccgaggacaagatcattgtgttgatgggtaagaagaaggttgataagagctcgccagaggagaaggttgccccgacaccaccgttggccgctggcccaaatgttttgcgcacagaggatgtggtgccttcactagctcccaatgatcagtgggtgagcgatctcatgtcaatgggatatggcgaagaggaggtacgctcagccctccgggcgagctttaatcatccggaaagggctatagagtatttgattaatgggattcctcaggaggttgtttcagagcagggattagctgcaatcccgagcgtacagacaagtgatcaattgcagcaattaatggcagatcttaacattacacggatgcgtgagatgattaatcagaatccagaactaatacacagactaatgaacagactggctgaaaccgatccggctaccttcgaagtctttcagcgtaaccaggaggagttaatgaacatgatttcaggcggcgcaagtcgcaccccgaacgagattgaacatttacagattactttaaccgccgaagaaaccgccgccgtagggcgtttggaggcactgggtttcgaacgtgtgatggccgttcaggcctatctggcctgcgacaaggacgagcagctggccgcagaggtactaatacgccagtcagaagaggatcgagactaa

SEQ ID NO: 42825 - protein, 290 aa, DROSOPHILA
MKLSIRMLDQRTITLEMNESQEVRALKQKLGNLPEVAMPAENLQLIYSGRIMEDAMPLSEYRIAEDKIIVLMGKKKVDKSSPEEKVAPTPPLAAGPNVLRTEDVVPSLAPNDQWVSDLMSMGYGEEEVRSALRASFNHPERAIEYLINGIPQEVVSEQGLAAIPSVQTSDQLQQLMADLNITRMREMINQNPELIHRLMNRLAETDPATFEVFQRNQEELMNMISGGASRTPNEIEHLQITLTAEETAAVGRLEALGFERVMAVQAYLACDKDEQLAAEVLIRQSEEDRD

SEQ ID NO: 42826 - DNA, 5508 bp, DROSOPHILA; identical to SEQ ID NO: 25834

SEQ ID NO: 42827 - DNA, 1769 bp, DROSOPHILA
agaacgccaagcgcacagcaatcagcaccgaaatatcagcatcgaaatatcagcaaataaatattagctgttctaaaccaggagggcaaactgaacttggagcaaagatttagttcggaacggaagtaaagctcggcaacaagtgcaaacaattaaaagcagttaactaaagtgcaacgctctaaccattcgagttcatatcattgcaaaagtcaaacgaaaagtaaatctctgaaatgagccacatacccattagtaacacaattccaacaaaacaaactgatggtaatggtaaagctaacatttcgccggataagctggatcccaaggtttcgatcgacatggaggcgccggagttcaaggattttgccaagacaatggtcgactttatagccgaatatctggagaatatacgcgaaaggcgcgttctgccggaagtgaagcctggctacctgaagccattgattccggatgctgcgcccgagaagccggagaagtggcaggatgtgatgcaggacatcgagcgagtcatcatgccgggcgtgacacactggcacagtcccaagtttcatgcctacttccccacggccaactcgtatccagcgatcgttgcggacatgctgagtggagcgattgcctgcatcggattcacgtggatcgccagtcccgcgtgcacggaactcgaggtggtcatgatggattggctgggcaagatgctggagctgccggcagagttcctggcctgttcgggcggcaagggtggcggtgtcatccagggcacggccagtgagtccacactggtggctctgctgggagccaaggccaagaagttgaaggaggtgaaggagctccatccggagtgggatgagcacaccatcttgggcaagttggtgggctactgctcggaccaggctcactcatccgtggagcgggctggtcttctgggcggagtaaagctccgttccgtgcagtccgagaatcacagaatgcgtggtgctgccctggaaaaggccatcgaacaggatgtggccgagggtttgattcccttctacgcggtggtcaccctgggcaccaccaactcctgcgccttcgactacttggatgagtgtggaccggtgggaaacaagcacaatttgtggatccatgtggacgctgcctatgccggatccgctttcatttgccccgagtatcgccacctgatgaagggcatcgaatcagcagactctttcaatttcaatccacacaaatggatgctggtgaactttgactgctcggccatgtggctgaaggatcccagttgggtggtcaacgcgttcaatgtggaccctctttacctgaagcacgacatgcagggatcagctccggactatcgtcactggcaaatcccacttggacggcgattcagggcactgaagctctggttcgtcctccggctgtacggtgtcgagaatctccaggcccacatccgcagacactgcaactttgccaagcagttcggggatctctgcgtggcggactccagatttgaactggccgccgagatcaatatgggattggtctgcttccggctgaagggcagcaacgagcggaacgaagctcttctcaagcgaatcaatggacgcggccacatccacttggttcccgccaagatcaaggatgtctacttcctgcgcatggccatttgctcgcgattcacccagtccgaggacatggagtactcgtggaaggaggtcagcgccgctgccgacgagatggaacaggagcagtaa

SEQ ID NO: 42828 - protein, 510 aa, DROSOPHILA
MSHIPISNTIPTKQTDGNGKANISPDKLDPKVSIDMEAPEFKDFAKTMVDFIAEYLENIRERRVLPEVKPGYLKPLIPDAAPEKPEKWQDVMQDIERVIMPGVTHWHSPKFHAYFPTANSYPAIVADMLSGAIACIGFTWIASPACTELEVVMMDWLGKMLELPAEFLACSGGKGGGVIQGTASESTLVALLGAKAKKLKEVKELHPEWDEHTILGKLVGYCSDQAHSSVERAGLLGGVKLRSVQSENHRMRGAALEKAIEQDVAEGLIPFYAVVTLGTTNSCAFDYLDECGPVGNKHNLWIHVDAAYAGSAFICPEYRHLMKGIESADSFNFNPHKWMLVNFDCSAMWLKDPSWVVNAFNVDPLYLKHDMQGSAPDYRHWQIPLGRRFRALKLWFVLRLYGVENLQAHIRRHCNFAKQFGDLCVADSRFELAAEINMGLVCFRLKGSNERNEALLKRINGRGHIHLVPAKIKDVYFLRMAICSRFTQSEDMEYSWKEVSAAADEMEQEQ

SEQ ID NO: 42829 - DNA, 9889 bp, DROSOPHILA
taattgctgccgggtaattgcaactgagctcaggtcagcgagtttgctaaccatggcgtcattatactgttgcactataaaatcattcgacccaagtccgattaacttaagtgggtcttagaccaaaagatgtgtatttcgaatacttctcaaacgttatttccttaagtcaaatcatttcaagaactgggagagcaaataaatatgcgatttcctcgacttatagttacttgtgtgaaatttgcgcgcttgtgcaaattcgaatgtttgcaacttaattggactgcataatagattgggcaaaaggattttataacaattccagtgtccagcccatcgtactgatgtggctaattgttttgctgacttgcacctaggcaaagcaatttcccttgaaaacaatcaaattcaaaacaatcaagtaaacaagacagctgagtgaaagactttggcttcatgggtgaacatatttgtcggttgaaggttgagtttttgtttaagatgattgcacatggcacacaggttgattttaatctaaatttaatttgagcatttgagcatttttctgctgaaccgggaaaacccacatttgcttacctagaaaaaccggttttcagagaaagttgcgagtaatacatatttaatacgatttcaagtcctgtgtgtacaacgttttatctaagaaaaccagaaaaccagaagctttttagcttagacagctttaatatttaattacagtgttcacaaaaaaaaaaaacgaaattccccttttctttgcttcaaatttaattagacatgtatctattgtttttttttttccacttgcagcttatttatccaacctaagccaactaaatgatgcaatgctggtgacatataaaacgaaagtggaaacggagttcattccttaagtaaccaatttaagatgttgtgctcccaagatccctaaaccaccgtccaaacccttcgaataacttatttaagccaagatatagacaaaatggaggacgagtggggctcctttgatcgtctgcccagtgttccgagtgcctcgatggatttggagacggaaaacgaggtggtcagcaattggtccacactggccaacttcacgcgacttgtggctggtgccgctcctgaaatcgtcaactatacgctcaacatgatcgacgtgggtgtgggcatggccacggatatatccaatttgagcgtgagcaccacgcccctgcccgcctacgcaatctccaatagctcctcactggcgcacaccaatagtcgccatgaagcaccaccgatggcggaacaggttccggagcacgtgatggatcacgcacctcaactatcccgatccgggttgctgaaagtgtatgtcctggcggtaatggcactgttctctctgctgggcaacctgctgaccatctggaatatctacaaaacccgcatctcaagaagaaactcacggcacacgtggagtgctatctactcactgatgttccatctgtccatcgccgatgtcctggtcacctggttctgcattatcggggaggccgcgtggtgctacaccgtccagtggctggccaatgagctcacctgcaagctggtgaagctcttccagatgtttagcctctacctgagcacctatgtcctggtcctcatcggagtggaccgctggatagcggtcaagtatccgatgaagtcgctcaacatggccaagaggtgtcataggctacttggcggtacttacatcctgtcgctggtgctcagcttgccacaggtaagttttgatacactgaaaataagacctttaaagttcttataaaatcatttgcctagaacaaacagataagatagttacacaaataagcaagattgtaataatataaaagtcatttttggcctataaatggtctaaaaatatttgtgggatatgttagattcaatctttagataatttaaatgaaaaaaagttaaaggtgccctttgattaggaaatcagtaaaagctttaagatctcctcttaatttatgtaccctttcggaaaatttctgttcgacgtaaatgcaaaaagccttgagggtacccgtaaaaacattattctatttaaaaagatttagccaaagggcaaatttaaagcgtctgcatctgaaaaaatggcccttccagtgaagtgcgaagaagacacgcttatgaaaataatccagtcacttttggtggggcgttccattacgctaagttaaagctgcgacttagccgtggtaatattcacctgccactgcccctgcctgtgccccctactcctggcactccatttgatccttacgctcgcgctgatgaagttgaaataatatgtttactttataacacgtatacgccccgtggcacagtgcaaatagtcttgagtaggcgccagaatgtgtgcagacattaaaaatgattgcctttcgcacaataagtgtacactaaatgtggctttaggccgctgccacgcccacacacacgcgtgctgatgggcgtaggaatgggcatagggttgggcgtatggggacacccaatcgaattccggtcgtccgaccgacaaagggtttttttcttctggtttttcctctcggcttttcgcttggggacgggcgaccaaataaaaaaaaaaaaaggtccgaacaagtgtgtcttctgcctgacgacagacattattcatattcccgatttcggttctttgtgcgcagataggcacactgggtgatatattcctttgccctggcagtcagctggcggataagcctgaatgggactgcattaatgggcgtcactcgctttgttctacaactctagaacgactcggcttcagatttccggcaccctgattgtataatatatgccgcgtgtctccacatcccgatttcatactcgattcgcctggcctttccttgatttatggccccgggtgaggcacttcacttctcgaattcagttaatctttagctggagtgctacgagctcctgctcgtgtttttccttaaagtggaaattcgtggacacttcagtttagggtgtcactaaggtaggtaattagcacgaaatctcacttcaaagttgccaagggttagtaatatagttagattgaaaagtgactgcaaactttccactgctctttatgtgacccgggtcataaatatcgttcgcagaatttggttagccataagtggggacaagtgggtagaaaggtcaaaccttctgtataaaaagatttgtcacctgagagatgccaaaaatagatgaaaaagaaccaaagggaaatttcctcctaagtggatggtaagtggatttcccgcacgcaagttatgcaactagcacactttccccactgctcgcccgcaaatgtatgctaaaatgtagctcatttaattagggagcccagcaacccgacgccatttccttttatctgaataatgtattgcgtggaacaataattacagacgtaccgtacaaaaatcgaggcgagattatatttgctcactttggggcaaaatgtgtgtgtggtttttctgggtgcgaaggcatgcgcgagtcagtttgttaaatcatctgacttgtttaaatgccgcaaaaaatctactgagcttaataacattttgatgtttttttccaatcgatgtcaagcggaaaatttggccgttttgttgctgggaatttgggccgacttttggtccagccgacccataatggaaaggacataatgtattggttttggatttttaaaatagaaccagactttgatgaactgtccagcttgggtgtaaatatttgatgacgaacgtcacaaattacgatgatatgacagaagtcatttatggatggccactgacacccaattaaaagaaactttgcaatcattaagccaatttttatggtccacttttcgacatctcgctgagatcccgggaaactttcttcatttcgcttctactcgaatatgcgacataaaatttatgccgcttacagacgtgacggtcgaaacgttcccgccggaaacgtaggaatcatctcaaacaattttccggataactttttccatgtcacacgttcatggtgcaggcaaccaaacagccaaccaaccaaccaagtggcacatgtattggtaaggagccacatcgaatccaatatgagacgcgccgctgaactcgtcggtttcaaataaaggagcgaaatgaaaattcacttcgactgccaataaacaacaaatgttttcaacagcagcatttatttggctccacttctatcgaccccaactcctccgcgtccttcgaacccaaggaaaaaagaaaaaaagtttagtaccacacgcacacaaccacacagaagaatcctgccacaataactcgaagtgtgagcccaaaaatgtggcacaatgaaaacaggccgccataatacagtcaaacacaaagttatccacaggtcctccgcagagtattattgcgaattgaatttcacccacatatcatcaaattcagcagccttaggtggcataattaaaatttcgtagaattgtttacaaattggagggaactagtcaatattacaagagtcccttggcgatttcaccttcagtgtgcgcgggcttttgataatcgataggggtccttaaatgcttagctttaagtgaattaaaatttgaatttagtttcagaatatttacagcagaatttgaatcaataattgcaatttatatgtgcaagcattggcgaataaagtaaataaccggatttaattattaggtgacaaaatcgtaacatttaaatatatttacctgaataacaattggaaataagtgcaaaaacagcaaaaagtataataaagtttagataaaaaatgaaatccatttaatattttaatttgggctcatctggattcatattttaggtgacaaaattaattattataattattaaaacaaatgagcaggtaacaagtcagtaagctctaacaatccttgttaaatctaacttaaacgtagctgagtgtccaatttaaatggtcaatttaatcgtgcctttaagccaaacaaatatgtatattttaacaatctgatagttttacaaacgtcttaaacgattgccaagcacctgaccgatgtgtgaaaactacgaacttgagcaatacaatttggttagaacggaagttcttgaagttgttccctcacaatgaatcaatcttgttttattttactgtcgcaagtttttgtctaaagtttttcgttgcaacttgtctaactttgccgcaaatagtgctgaaggcttgcttgtgtgtggcatggttttagcgtggagcgccctttaaacttttcgagcatttttaatgaatggcaacatggaaataatgaacaaacacttgaaaagttgaaataatttaagaaagaatattgaaagccacaattatccttgctttcttttactagtcatgacctataaaaatatatttttctactataaaaagccactggcactttacttcggtttcggcggaaggcaatggcttggaagttataggcgaaattaataaaaatcaaccattagacgattatccgcttctcgttatttctgcgcggggggtttttgtgtagtttttactacgccactcggcggagcgcggaaagttttcccatttcctccatttgggtcagctgttgacacagcggccgccagaaaacccataaaaagcgcaaataaaaatacttttagcgtattagttatgcgtagacacatccatcgttggtgtatttaagatgctacacttcctttatcagttatggccacacattttcctgctcgaaaagctttttcatggtacgagaatttccacctttctacgtggcactctgctaaactcggtaagacttgaacaatggagcagtagcaactgcagaatgtatacattttccaaaaatgttccatcaatttggaaatgatttcagccaaacaagaaaatcaagcaaaagcacttttcacccataaccaagccgcttgccacccacaatggaaagtagatcaaagccacaacgttttgagtcagcagtttgttaccatggaccgcatgtgggtatttccatgtaaacatgcctgtacttagtccttggtgcaatcaggacatggatggtttgctaataaaaatcttattacggcaccatcttatttacacaacacggtagagatatatggttttaaaaatttccattttcctgcttaaaacaggcaataaattgataggaaggtaaatatccttaagaaacacttgtataaagttcaagttcaatccatgtgtcttaacctttaattgtttactatgttgcatgttcgttccagttcttcatcttccatgtagcgcgtggcccattcgtggaggagttttaccagtgcgtcacccacggattctacacggcggattggcaggagcagatgtacgccaccttcacgctggtcttcaccttcctgctgccgctgtgcatcctgtttggcacctacatgtccaccttccgcaccatttccagtgagttttcagcgagaaggagtttacattcccgtactaacctgataacctgataatcgtgcaggcagcgaaaagatgttccagggatcaaagttggccaactactcaacggccaaattgcccacacagacgaatcgccagaggctgatacacaaggccaagatgaagtcgcttcgcatatccgtggtgatcatcatagcgtttctcatctgctggacgccctactacgtcatgatgattatgttcatgttcctcaatccggacaaaagggtgagtttccgcccgttcccctgccgaatttgaagctgaatgacaagcagatatcgattcctgataccaaaaggctcatcaatcagcagtcgatttgtcagtttgtagcgcacggtttgggcgaatcctttgtcctgttccctaccatatttacgacttggggtcatggttgtacgagtaaaataaaaacgagaatacgacacgacctagtcgcagctggcaaatccgtttggagctatacccactgccataaaaatgatttcttatgctcaatttttaattaatcgttacgccacccgaccgaccacacggtcgcaatttttccttaacggcgtacccaactttgatgacttgccagagatggtccgtaaaagctggcccaagttgcaagattacggcgaggcaatccgggcagaaggaacacaaggtcgaattgctacaaaccgagcattctgtacagtaggggaaaatgaatgagtagcaaaatatttccaaagtttatttgtttcgatttaaattttaaaaatgctataattgacaaaatagaatcatttttgctgtcactatttttaagtgaatgggatatttgtccgccgattaacctgaatttcatatcctaatgaattggattgcacattcataatggcatttccgctgaaactctttctcgctgtggaaatcccagcgatggcagtgtgcaaaataattaatttggaagccaaatttttagcgcagtgtatccataagcgacctgagccccaattcgaccgcaggaacgcccacaatgcgcccacgcgaatgtagaggggaaaaggtgaaaggtgtgcgacaagggcaaggaaattaatttgaatttcacggattgcttgcagctgggcgacgatctgcaggacgccatcttcttcttcggcatgtcaaacagcctggtcaacccactcatctacggtgccttccacctgtgtcctggcaaagggggcaagtcgagcggcgggggcggcaacaacaacgcctacagcttgaacaggtgagtggtgagccaacagaataagttaattctattaaccaccacatttcgtacttgtttttgcgcttttatcgtgtcaaaaaatagttacttttcactcaagcaatacacttttaagacagccaagcaagcttttgaagtctgaattgctgcttttctgatcaaagagtttttattcttggtaatatttcacatttaagagtataaatgatagtgtaaatttaaataaaatagtagaaagttttccctaaagatcgatgtataactattaatacatattttacttaatctagtgttgctttttaatgacagtttttgctgtgcttaaatttttacaaaataaatcttaaatccttgcaaagagttttcttttatgcaaatggaaaacattgtttcatcgcttgttaatatcatttactttatttatttattattctaaacagctgccaaagcagcgaactatctcaggatcagatatgatttgctatgattttgtcacacttcctatgtttgttttgataacgcaaaaagcacacacaccgtgattggcaataaactgataaattcttttccgtctggtttttatcacctcaccgcatcgtccattcccccgtccactttccatccgcaggggcgactcgcagcgcactccatccatgctaacggcggtgacgcaggtggacggcacaggtggcagttcccgccagatgcgggccttccgccagcagagctactaccgcagctcctccaacggcacagccggaccgggtgcagctccctttaaggagcaggttggcctgctgcacgtgggtcccggcaatgggacgcccggtggctccgtctctagcggcgccacgccgcagttgatccgtaagggatcggctctgttggcccgacaacccagctgtctgagggagcaggagcaccagcagcgtttgctgctgcacgagaagccctcgaccctggtgctcagctacgacagccagcggggcggagtgggcgtgggcgtggccagcggtctgctggacaacaacgagcgagtgtcgagcgtgtgagagcagctggcgatggcggtagcggcggcggcggtggcggtggatgcaccggacacagtagaagcagcagcagcaacagcatcagccgatgcggatgcgaatgtggcgatggaggacgcctgctcctgctgccattgcctgagcagggagctggtgcggcggcagttggagctccaagtgcttccagtgcagtgaggcgactgccagtggatttgatccggctggctgagtggccggagctggggattccagcgattccctcggtcaacgtggggagtggcgtcgatgattagatcaccggggcgtgcaacatgtgcttagatagtgctaatcgagagttaagtcttcaaacacaatgggtgtgcttagaagtagcgtaggattagagctagtccgtacgaagtggttgccctacactgggagaaactcgtggtcactttgcatgttctctgaatgttctactaatacttgacttcaacaaggatacaaatataagagataatatctatgtacatcccataaaaccataaaaaattgcaattaaatctggttgtgaaaaaaatagatttaacttctgaatgtttcaaatgttgccaattcgccagcgtgtaatccgatataagcaacaataattacaattataatcaatgtgcaatcagagtcagttacaatttacaattatatgactgaataattggactatgaatatatacgacttcaaatgagtttctctcattagcagggcaactttgtaatgttaattaacagcgtttttcagtttttcattttgttcccccagccgagtaactcaaaaatcgattctataattgtgtaaaatagaaatcatctaaaaacagggtaaatctaactattgtaaatacatttactcattattttgagaagaatattgtaaaaaaaaaagattgtaaagtttaaaataaatatgagttcatgttcaacgacacaaggaattattttgattaatttaaagtactaaaaa

SEQ ID NO: 42830 - DNA, 1644 bp, DROSOPHILA
atggaggacgagtggggctcctttgatcgtctgcccagtgttccgagtgcctcgatggatttggagacggaaaacgaggtggtcagcaattggtccacactggccaacttcacgcgacttgtggctggtgccgctcctgaaatcgtcaactatacgctcaacatgatcgacgtgggtgtgggcatggccacggatatatccaatttgagcgttccggagcacgtgatggatcacgcacctcaactatcccgatccgggttgctgaaagtgtatgtcctggcggtaatggcactgttctctctgctgggcaacctgctgaccatctggaatatctacaaaacccgcatctcaagaagaaactcacggcacacgtggagtgctatctactcactgatgttccatctgtccatcgccgatgtcctggtcacctggttctgcattatcggggaggccgcgtggtgctacaccgtccagtggctggccaatgagctcacctgcaagctggtgaagctcttccagatgtttagcctctacctgagcacctatgtcctggtcctcatcggagtggaccgctggatagcggtcaagtatccgatgaagtcgctcaacatggccaagaggtgtcataggctacttggcggtacttacatcctgtcgctggtgctcagcttgccacagttcttcatcttccatgtagcgcgtggcccattcgtggaggagttttaccagtgcgtcacccacggattctacacggcggattggcaggagcagatgtacgccaccttcacgctggtcttcaccttcctgctgccgctgtgcatcctgtttggcacctacatgtccaccttccgcaccatttccagcagcgaaaagatgttccagggatcaaagttggccaactactcaacggccaaattgcccacacagacgaatcgccagaggctgatacacaaggccaagatgaagtcgcttcgcatatccgtggtgatcatcatagcgtttctcatctgctggacgccctactacgtcatgatgattatgttcatgttcctcaatccggacaaaaggctgggcgacgatctgcaggacgccatcttcttcttcggcatgtcaaacagcctggtcaacccactcatctacggtgccttccacctgtgtcctggcaaagggggcaagtcgagcggcgggggcggcaacaacaacgcctacagcttgaacaggggcgactcgcagcgcactccatccatgctaacggcggtgacgcaggtggacggcacaggtggcagttcccgccagatgcgggccttccgccagcagagctactaccgcagctcctccaacggcacagccggaccgggtgcagctccctttaaggagcaggttggcctgctgcacgtgggtcccggcaatgggacgcccggtggctccgtctctagcggcgccacgccgcagttgatccgtaagggatcggctctgttggcccgacaacccagctgtctgagggagcaggagcaccagcagcgtttgctgctgcacgagaagccctcgaccctggtgctcagctacgacagccagcggggcggagtgggcgtgggcgtggccagcggtctgctggacaacaacgagcgagtgtcgagcgtgtga

SEQ ID NO: 42831 - protein, 547 aa, DROSOPHILA
MEDEWGSFDRLPSVPSASMDLETENEVVSNWSTLANFTRLVAGAAPEIVNYTLNMIDVGVGMATDISNLSVPEHVMDHAPQLSRSGLLKVYVLAVMALFSLLGNLLTIWNIYKTRISRRNSRHTWSAIYSLMFHLSIADVLVTWFCIIGEAAWCYTVQWLANELTCKLVKLFQMFSLYLSTYVLVLIGVDRWIAVKYPMKSLNMAKRCHRLLGGTYILSLVLSLPQFFIFHVARGPFVEEFYQCVTHGFYTADWQEQMYATFTLVFTFLLPLCILFGTYMSTFRTISSSEKMFQGSKLANYSTAKLPTQTNRQRLIHKAKMKSLRISVVIIIAFLICWTPYYVMMIMFMFLNPDKRLGDDLQDAIFFFGMSNSLVNPLIYGAFHLCPGKGGKSSGGGGNNNAYSLNRGDSQRTPSMLTAVTQVDGTGGSSRQMRAFRQQSYYRSSSNGTAGPGAAPFKEQVGLLHVGPGNGTPGGSVSSGATPQLIRKGSALLARQPSCLREQEHQQRLLLHEKPSTLVLSYDSQRGGVGVGVASGLLDNNERVSSV

SEQ ID NO: 42832 - DNA, 6055 bp, DROSOPHILA
atgtttggtgtgacggcggaataacctgttgctatatagattttgtcataaggaaacgttttgccattggtgcaatggagggtgttgcaattcgtatccaacctttcagcggatactcccaactgcatctctatgccgtagtccttgtagaactgttcttcccgaagggccaagttcttggtatacgtgttcaacaagttcatgatccttgttcgatcatagggcagatgtttttcaccgcagacgagggtcaagcgaccagtgaatccctcctggcgcagcgtctccacacagacagcacctgaaggaccacctcccaccaccacaaagtgtcgttggtcctgccagttacggcatgccattgattttattcttgcgtgtcgtagtaaataagatcgcttcacttggacgagcacctggcctctggagtcgacattaactcgatgacagggcagcgaatctagtcctgggaagttttcaatgtcaccagtttccagattgaaacaaactccgtgccaaggacatcgcacccgattcctggacagaacgcccttcgcaaggggagctccacgatgtggacacatggcgccaaccgcccgcagaattccactttgcttgaccagaaggatgctgggtattccgcttgcatccacttgcctcatctcattttcttgcacttccaacttgtggcacacgaccacaggatcgatatattcattttcttccatttgaaatgttgaactcagttgagtgagtcatattaattgacagtataataatggaaagtgtgaagcacagaaaaccaaagctggactatcagatacatataaaacatcatgtagaaaatgctaggcggatgtggatatgcaagcagaaaaacttgatacttatcatataacataggcgaatgatcttgatggaaaatatatatacttcatagaaagccttaaaatgaattaatacacctttctggttaacaatttttgttgtcttttattcttatgtgtcaaatagtaatttatttcatcgcattcgttttatcatttacgtagttgctgtttttttttactgacatttctatttggttgaaatatttttggtttttgtaattcttttattcgttagatataaatacgacatcacgttttcgtaattgatatttctcctatgcaattttcttgtattcctatataaagcaataaataacttgttgatgtttttgttggttttggtttttctgggcagggcctaaccaatgttgtgctcgccatgccccgcatttgtttgacgctatacagacttaattaatttaaaattcagttttagtttccattcactatacacaaatatacaatatttacaataaaatatcagggctacgaatctaaatgatagagcgaagtaatcgttcgaaacagataatcataacgcctagtaacattcaagccgtgtcaggtgtatcttcaagctaagcccaccttttggcaaaccgaagtgaaatcaaggattttgagcaaattgtgttttggatttttgttttcggtgtaggcttcccaaaaattaagaaggcttagggcataaacaatatgttgtggatgtgtggtggtgtaggtgagtgagtgtgtgtgtggtaaagccacgcgaagcgttgccacctttctcaggcgccaagcatttccgctcatgttgctgaagtcgatgttgcagctcgccaagtcacatgttgctgcctctaatgttgttgctgttgccttttctgtttctgctgctttttctgtttctgttgctgctgctgctgcggttgcgagcgttcagtgtgatgccgctgctatagctgcgacgaatgtggctgatgctgctgctgctgctgggcagcggccagcagcagactgcgcgactgcatctcaaagtagcgcaagagcagattcgagtatcagtaatgtacgccgggcgccgacggattgggggcggtactgacgctcaccccgccgcttcccccgccactactgttgttgttgttgtggctgctgctgctgttgttgttcgcattgttgttggcgctggtcgtgttggtgctgcccgaatcgcccagccaggagtcggggctgggcggaaagtcggggtatccctgatcgggactggaatcgttgctcagatcggagacgttgttgctactgtggaggcggtgatgcgccttactggcatgcaaactagacccgaccgcttgatctgaaaccaatgctaaggtcataagttctgaggacttggaagaaccagggaggcagacactcacctatgttggtgtacactatgttgtccggataggagccgaacgtgtggccctgcccaactggcggcggcgagcgactgctcggcggatactgtgacggactcgaactgccgtgcatgtaggatccgcggatgctgtgcggcgaggcgccctcatccaggcccaaattgacggtgctgtagctgtcgttgctcagatctgcaagaagcagaggtggagattgtagcagggcggttattataaatgctatccaacaaatatgacaaattacactatcactaattggaatataaggtttgttttctagaaatatttcaggtatctaatattggaaatattcagtttgctcaaaatataatagcactgaactttgaaactctctcagacaagtgtctacttgacaatttaaacctctttgactatttttcatcaaaccgttctaggctcaagcactcaccgtggtgactgaagctgtcgtagtcaaccttcagctcatccttgtcgaggaatttgtcggtgcgcggcgagcagttgcccttcatcgagcggaagtactggctccagcgcgtgcggcccgcatcctttttcagacgcttctccttggcccgcctgccgatggagaggagcataggtaaagcatggaaaagtaggggcaaacgcagtaggacgcacctgttctggaaccagacctgcaccacccgcatgtccaggcccgtgtcctgcgaaagctgctcacgtacatggcgggcgggtttggggctgttattgtaggccgttttcagggtctccagctgcttggcggtgatcgtggtgcgcggacgcttattcggctgatcgccgtccaacgagccatccagatagaggcctaagtggcggagtgcaatctacagattagaaggagctcttcgaggagaatggtaaaaggatgacccacccttggccttggcctcctcgtagtcccgcttgcagatcagcttacgatcctccatcaggtagaactcgtcgccggtgttcagggtgcgggagcacatggcgcacaggaagcactgcagatggtagacgttgtcctgcgcccgacgcaccacctgcgtgggcggaatgcccatatcacaagcggaacactttgtaccgtaacgtctgttcgacccgaacattggcaagtgcgacatggaaggagatttttcattaaaccaatttggcctaccaaagcgtccaatgttcaccccctgccaacgaccttggcatttgagaaatttacttacttgaagaagtcctccttgcagaagagctggccattccgcgcgaagcacttgtcgttcagctggccatgacactcgctgcactgcaggcacttggcgtgccacgtcctctccagcactttgaggatgaagcggtcaaggatcagctcgtggcagccgccgcatttcgggattgtggctgtgggaagacggaagaatatccaattaatatgatatcaatgctatgatgtaggatggtctatttctgcacaggcgttaagagttttccgtttttctttacccattttgttcttaaaattttatattttcgatttcgtttcagtaaaatatttttgcctatgcacgcacacaaccgagtcaagacaactgttaattgagctattttaatcaaaaatgaatttgattttgtcgtctatttaaaaagtcactatatagaaaagattccgattagagcgtaggtattgaaaatcacgaagtgtttctaccaaaaagattttcaaagatattttcaagaagattagagtttcgtgcacatattacagttaaattaaaaaatcaaaatgagagttacaaatatatatatattctctgagtaataataaaaatgattattatgttataactgcattacacattgtttttcactgcgatattttaattttataagaagattttaactgtgccgaaacatattaataatattaataacatttgaaattatacctttggaaaaacaatcaaaaagcaaattaagaatctgttaaaacgacatttgttataaactcattatttaaattgagaaaataactcatattgtgattaaaaccgatatttataccgcgaatttgatgatttgtccttcttttttttgacatttgcagaaagagaataacgctaaatcaatagaattatgatgattactcttctaattgatatgtttttttttaatcatcattatccataacaacactatacattcgatccatataaatgtagatccttgaccgttctcttttccaaatcccacaatttgtcttaggcttggcacgacctatgacccactaggtataacatatcaggtggtaactccttttgctacttacatagcaagaactctggcaattgactcaggttaatcggcggtacgcgatcgtcacatttgccattggacaggaagtcacttttgaacatcattagcttcaaaagttccatactgttgttggcggtggaaatcccgacgcactctgattggattcttttcctatgcagagcaatcaaccatcactttcacagtttcacattgtttgtggtttccgttggctcaatccacattttacttgattttggaaaaactttttttttgcgctaacgaatttcggatttagtttactttttatttgtatttttcgacttggcttgttgtctaccgttatcacagaacttttagctgcacgaatgaccgggcaaaaaaaccgagcggcaacttcgaggcttggaaagcaactgacgactaacgggccacgattcggttgcttattggagaagggggtggactggaatgcagccccgcacacgcacacacacgcgcgcacatacaggggctgacataatcacagctggaatgggaaacccaacccttagcgcttccaattggaaagccgattcagctgcaccctgtgccaaatgtgtgctgctgttgttgttgctctggctgtgccagttttccagactggcctttttttcgctgtttttcttttgtattttttccctttggcctcaacaattgagtttgggttggtcgccaaaaacaaaaagcggggaaattgcattgtaacactttgccacattccattttccactggcatgcgtgtgcgtctggcgtacgtatgtgtgtgtgtgtgtgtgttacaggggggttttcttttggcttttttgtgtgtttgtgcctgggattggttgttttgtgtgcgtcgacgtcgcctgcagttttcggggagtggtctcttgaaaagctctgctcagctcggcttttttgccagcacccgccctctctttctggcactcggcccacctctattccactttcgtggtctctctctcgctttcgcattgttggcaaattcggttggaaaacacactggtgtgcactaaaaatacacataaatatgtttgcattgttctgcactgcagtttggtcgactcttcttctaccccgtcatatcctgtgcccgtgcgttcgtgtgtgtgcgtgcttgtgcaaatgtgtatgtgtttgagcgcacttggctgccattgcttattgttgtgtcattgtttcgtaactgtgaaaatgaccttaaagccgttaaatagctgactgactgactccgaccgaccggctgatcgagagcaacgtctgcgcacctgccacccagaaacccctacccatacccctgacccctaaccccaacgaacccccttagcccttaacccctaaccctttgcagccaaaaacccacaccgagaa

SEQ ID NO: 42833 - DNA, 2487 bp, DROSOPHILA
cagttgctttccaagcctcgaagttgccgctcggtttttttgcccggtcattcgtgcagctaaaagttctgtgataacggtagacaacaagccaagtcgaaaaatacaaataaaaagtaaactaaatccgaaattcgttagcgcaaaaaaaaagtttttccaaaatcaagtaaaatgtggattgagccaacggaaaccacaaacaatgtgaaactgtgaaagtgatggttgattgctctgcataggaaaagaatccaatcagagtgcgtcgggatttccaccgccaacaacagtatggaacttttgaagctaatgatgttcaaaagtgacttcctgtccaatggcaaatgtgacgatcgcgtaccgccgattaacctgagtcaattgccagagttcttgctatccacaatcccgaaatgcggcggctgccacgagctgatccttgaccgcttcatcctcaaagtgctggagaggacgtggcacgccaagtgcctgcagtgcagcgagtgtcatggccagctgaacgacaagtgcttcgcgcggaatggccagctcttctgcaaggaggacttcttcaaacgttacggtacaaagtgttccgcttgtgatatgggcattccgcccacgcaggtggtgcgtcgggcgcaggacaacgtctaccatctgcagtgcttcctgtgcgccatgtgctcccgcaccctgaacaccggcgacgagttctacctgatggaggatcgtaagctgatctgcaagcgggactacgaggaggccaaggccaagggcctctatctggatggctcgttggacggcgatcagccgaataagcgtccgcgcaccacgatcaccgccaagcagctggagaccctgaaaacggcctacaataacagccccaaacccgcccgccatgtacgtgagcagctttcgcaggacacgggcctggacatgcgggtggtgcaggtctggttccagaacaggcgggccaaggagaagcgtctgaaaaaggatgcgggccgcacgcgctggagccagtacttccgctcgatgaagggcaactgctcgccgcgcaccgacaaattcctcgacaaggatgagctgaaggttgactacgacagcttcagtcaccacgatctgagcaacgacagctacagcaccgtcaatttgggcctggatgagggcgcctcgccgcacagcatccgcggatcctacatgcacggcagttcgagtccgtcacagtatccgccgagcagtcgctcgccgccgccagttgggcagggccacacgttcggctcctatccggacaacatagtgtacaccaacatagatcaagcggtcgggtctagtttgcatgccagtaaggcgcatcaccgcctccacagtagcaacaacgtctccgatctgagcaacgattccagtcccgatcagggataccccgactttccgcccagccccgactcctggctgggcgattcgggcagcaccaacacgaccagcgccaacaacaatgcgaacaacaacagcagcagcagccacaacaacaacaacagtagtggcgggggaagcggcggggtgagcgtcagtaccgcccccaatccgtcggcgcccggcgtacattactgatactcgaatctgctcttgcgctactttgagatgcagtcgcgcagtctgctgctggccgctgcccagcagcagcagcagcagcagcaacagaaacagaaaaagcagcagaaacagaaaaggcaacagcaacaacattagaggcagcaacatgtgacttggcgagctgcaacatcgacttcagcaacatgagcggaaatgcttggcgcctgagaaaggtggcaacgcttcgcgtggctttaccacacacacactcactcacctacaccaccacacatccacaacatattgtttatgccctaagccttcttaatttttgggaagcctacaccgaaaacaaaaatccaaaacacaatttgctcaaaatccttgatttcacttcggtttgccaaaaggtgggcttagcttgaagatacacctgacacggcttgaatgttactaggcgttatgattatctgtttcgaacgattacttcgctctatcatttagattcgtagccctgatattttattgtaaatattgtatatttgtgtatagtgaatggaaactaaaactgaattttaaattaattaagtctgtatagcgtcaaacaaatgcggggcatggcgagcacaacattggttaggccctgcccagaaaaaccaaaaccaacaaaaacatcaacaagttatttattgctttatataggaatacaagaaaattgcataggagaaatatcaattacgaaaacgtgatgtcgtatttatatctaacgaataaaagaattacaaaaaccaaaaatatttcaaccaaatagaaatgtcagtaaaaaaaaacagcaactacgtaaatgataaaacgaatgcgatgaaataaattactatttgacacata

SEQ ID NO: 42834 - protein, 440 aa, DROSOPHILA
MELLKLMMFKSDFLSNGKCDDRVPPINLSQLPEFLLSTIPKCGGCHELILDRFILKVLERTWHAKCLQCSECHGQLNDKCFARNGQLFCKEDFFKRYGTKCSACDMGIPPTQVVRRAQDNVYHLQCFLCAMCSRTLNTGDEFYLMEDRKLICKRDYEEAKAKGLYLDGSLDGDQPNKRPRTTITAKQLETLKTAYNNSPKPARHVREQLSQDTGLDMRVVQVWFQNRRAKEKRLKKDAGRTRWSQYFRSMKGNCSPRTDKFLDKDELKVDYDSFSHHDLSNDSYSTVNLGLDEGASPHSIRGSYMHGSSSPSQYPPSSRSPPPVGQGHTFGSYPDNIVYTNIDQAVGSSLHASKAHHRLHSSNNVSDLSNDSSPDQGYPDFPPSPDSWLGDSGSTNTTSANNNANNNSSSSHNNNNSSGGGSGGVSVSTAPNPSAPGVHY

SEQ ID NO: 42835 - DNA, 3620 bp, DROSOPHILA
cactccctctctgatgccacaaaaccgccaacatttttgaaccatttttcgaatttttttttataattttattagtcttgtaaattttctatcaaagctgacgaaccggtcacacccaaactttggaaaaatttttaaattttttctcattttattcaccaatatatatatcccagatatcactgatatcctagaaaaattataaaatttcgggatcgcattcccactagctgacgtgtatctagtagtcggggaactcgactatagcattctgtcttgttaattaataagtatatagtttttaattactttattaataccaggatattattataacaaaagagagagttctcgactatcatcctgttactcagctggaagtgtgaacgttttcaatatattatgaaatatcgctagaaattgggaaaacaaattttttaaggtttgggcggttgtgtatgtgggcgtggcaaaaagttgtttggcaaatcgatataaactcacaagatttataattaatttgaattacaatttacaattaaaatatgaaaatgtcccgccatgtcctgccataatttcgtaatttaccggcatatccttcgatgagccgccgtgtcccgtcatcccccgccgtgttccactgactgtcccgccgtgtccattcaaaagagtacattcatataacctctttaaattaatgtacagaagtcatgaattttatcaaacgatacataaatagatataaacgaaaatgagctttttatagcagcacaaagctttgagtcgaattttattcgaatgttaatacaaagcttttattaacagaattagttaacagaattagttaacagagcactaaaataattaatattcctaaaatataatgtccatataagggttgaggaataaaataagcagaaatatctttattccttaaataaactaattactttgaataagctttagcacttaacaaatttttgtatattgagaattagttctaaagctttaacttcgtgagccagtaatttcgccccttgggatcgacgatctgacaccgacacaattcttttccctgcgacaccagttcggcaaactgggcaaccatggggtcccgaccgcaggatgccactgcagtcaccttgtcgtagtcatcaaagaagtaggctacgaactgcaaatcctcgagacttccgtcgatgacaacgtccttgaaaggtccatatcctgcggagcgaaaggccctgccgaatatcacggtgtagaaaaaaggaatggcttccagtttggcaatgtggccactcatgttcagtgcagcaatgcgtccgtggtattgcgccaatccatagtggcttatatttactcgatctggaaacccacccaagatatatgcattggctatatccccgcccacataaacattgcgtactttagtctgcagaaagtcgttaacatccacggagccattgggattgatgtttataccactccgctggagaaaatccgtgttgcactgacaaccagtgccgagaatgagcagattacagggaattctagagttatccagtagtttcactgcaaccacctcaccacggctgtttcccaaaatcctgatgattccactgctcatgcgcaaatctaccttattctcctccaggagcttcagtatccgctgtcctatcaactcgcccaatgtgcttttgaaaggcacattttgccgggctaccagcgtaacgctgcgcgctctagaaaccagattggccgtagcctccacagccatgaaactggaacccaggcacaccacttgggttgatttgtccaccattttgaatatgctcctggcatcgccaatattccgaatgactttcacatttttcaagtgcactccgggtatgtttggtgtgacggcggaataacctgttgctatatagattttgtcataaggaaacgttttgccattggtgcaatggagggtgttgcaattcgtatccaacctttcagcggatactcccaactgcatctctatgccgtagtccttgtagaactgttcttcccgaagggccaagttcttggtatacgtgttcaacaagttcatgatccttgttcgatcatagggcagatgtttttcaccgcagacgagggtcaagcgaccagtgaatccctcctggcgcagcgtctccacacagacagcacctgaaggaccacctcccaccaccacaaagtgtcgttggtcctgccagttacggcatgccattgattttattcttgcgtgtcgtagtaaataagatcgcttcacttggacgagcacctggcctctggagtcgacattaactcgatgacagggcagcgaatctagtcctgggaagttttcaatgtcaccagtttccagattgaaacaaactccgtgccaaggacatcgcacccgattcctggacagaacgcccttcgcaaggggagctccacgatgtggacacatggcgccaaccgcccgcagaattccactttgcttgaccagaaggatgctgggtattccgcttgcatccacttgcctcatctcattttcttgcacttccaacttgtggcacacgaccacaggatcgatatattcattttcttccatttgaaatgttgaactcagttgagtgagtcatattaattgacagtataataatggaaagtgtgaagcacagaaaaccaaagctggactatcagatacatataaaacatcatgtagaaaatgctaggcggatgtggatatgcaagcagaaaaacttgatacttatcatataacataggcgaatgatcttgatggaaaatatatatacttcatagaaagccttaaaatgaattaatacacctttctggttaacaatttttgttgtcttttattcttatgtgtcaaatagtaatttatttcatcgcattcgttttatcatttacgtagttgctgtttttttttactgacatttctatttggttgaaatatttttggtttttgtaattcttttattcgttagatataaatacgacatcacgttttcgtaattgatatttctcctatgcaattttcttgtattcctatataaagcaataaataacttgttgatgtttttgttggttttggtttttctgggcagggcctaaccaatgttgtgctcgccatgccccgcatttgtttgacgctatacagacttaattaatttaaaattcagttttagtttccattcactatacacaaatatacaatatttacaataaaatatcagggctacgaatctaaatgatagagcgaagtaatcgttcgaaacagataatcataacgcctagtaacattcaagccgtgtcaggtgtatcttcaagctaagcccaccttttggcaaaccgaagtgaaatcaaggattttgagcaaattgtgttttggatttttgttttcggtgtaggcttcccaaaaattaagaaggcttagggcataaacaatatgttgtggatgtgtggtggtgtaggtgagtgagtgtgtgtgtggtaaagccacgcgaagcgttgccacctttctcaggcgccaagcatttccgctcatgttgctgaagtcgatgttgcagctcgccaagtcacatgttgct

SEQ ID NO: 42836 - DNA, 1620 bp, DROSOPHILA
atggaagaaaatgaatatatcgatcctgtggtcgtgtgccacaagttggaagtgcaagaaaatgagatgaggcaagtggatgcaagcggaatacccagcatccttctggtcaagcaaagtggaattctgcgggcggttggcgccatgtgtccacatcgtggagctccccttgcgaagggcgttctgtccaggaatcgggtgcgatgtccttggcacggagtttgtttcaatctggaaactggtgacattgaaaacttcccaggactagattcgctgccctgtcatcgagttaatgtcgactccagaggccaggtgctcgtccaagtgaagcgatcttatttactacgacacgcaagaataaaatcaatggcatgccgtaactggcaggaccaacgacactttgtggtggtgggaggtggtccttcaggtgctgtctgtgtggagacgctgcgccaggagggattcactggtcgcttgaccctcgtctgcggtgaaaaacatctgccctatgatcgaacaaggatcatgaacttgttgaacacgtataccaagaacttggcccttcgggaagaacagttctacaaggactacggcatagagatgcagttgggagtatccgctgaaaggttggatacgaattgcaacaccctccattgcaccaatggcaaaacgtttccttatgacaaaatctatatagcaacaggttattccgccgtcacaccaaacatacccggagtgcacttgaaaaatgtgaaagtcattcggaatattggcgatgccaggagcatattcaaaatggtggacaaatcaacccaagtggtgtgcctgggttccagtttcatggctgtggaggctacggccaatctggtttctagagcgcgcagcgttacgctggtagcccggcaaaatgtgcctttcaaaagcacattgggcgagttgataggacagcggatactgaagctcctggaggagaataaggtagatttgcgcatgagcagtggaatcatcaggattttgggaaacagccgtggtgaggtggttgcagtgaaactactggataactctagaattccctgtaatctgctcattctcggcactggttgtcagtgcaacacggattttctccagcggagtggtataaacatcaatcccaatggctccgtggatgttaacgactttctgcagactaaagtacgcaatgtttatgtgggcggggatatagccaatgcatatatcttgggtgggtttccagatcgagtaaatataagccactatggattggcgcaataccacggacgcattgctgcactgaacatgagtggccacattgccaaactggaagccattccttttttctacaccgtgatattcggcagggcctttcgctccgcaggatatggacctttcaaggacgttgtcatcgacggaagtctcgaggatttgcagttcgtagcctacttctttgatgactacgacaaggtgactgcagtggcatcctgcggtcgggaccccatggttgcccagtttgccgaactggtgtcgcagggaaaagaattgtgtcggtgtcagatcgtcgatcccaaggggcgaaattactggctcacgaagttaaagctttag

SEQ ID NO: 42837 - protein, 539 aa, DROSOPHILA
MEENEYIDPVVVCHKLEVQENEMRQVDASGIPSILLVKQSGILRAVGAMCPHRGAPLAKGVLSRNRVRCPWHGVCFNLETGDIENFPGLDSLPCHRVNVDSRGQVLVQVKRSYLLRHARIKSMACRNWQDQRHFVVVGGGPSGAVCVETLRQEGFTGRLTLVCGEKHLPYDRTRIMNLLNTYTKNLALREEQFYKDYGIEMQLGVSAERLDTNCNTLHCTNGKTFPYDKIYIATGYSAVTPNIPGVHLKNVKVIRNIGDARSIFKMVDKSTQVVCLGSSFMAVEATANLVSRARSVTLVARQNVPFKSTLGELIGQRILKLLEENKVDLRMSSGIIRILGNSRGEVVAVKLLDNSRIPCNLLILGTGCQCNTDFLQRSGININPNGSVDVNDFLQTKVRNVYVGGDIANAYILGGFPDRVNISHYGLAQYHGRIAALNMSGHIAKLEAIPFFYTVIFGRAFRSAGYGPFKDVVIDGSLEDLQFVAYFFDDYDKVTAVASCGRDPMVAQFAELVSQGKELCRCQIVDPKGRNYWLTKLKL

SEQ ID NO: 42838 - DNA, 5306 bp, DROSOPHILA
ataacctgcttttccagtgctttcaccaccacctcacctttatgtatagcgctcaaatgaagcgagatcttcgagtgcaattcaacagtttgggttccaaagaacaggtcgtggacttcctgaaggagcactacaatctggaatatagtgaggttgaccctccatcggctgactacacggattgcacgtacacccacttcacaccgcccaagcacgcccggcacatcgccgccgagtcggatgagcaggcctggagttcgaaaagcgacggaaaattctttacggtattcagagcacaccagttgaccggaactggcggagaagatttggaactgggaggactctttggtgacgaggagtaaattgttttgtaaatagatctttagtttggtggggtatagattttgtacaagacaaataggttgatatctaatatatgtaaacattgtatagtgaagaaaaaatcggcgacaaagttttgtatattttatttcccaaaaaaaataatacttaggtacataaattatttcaaagataaaattattttaatttaaaaaaatcccctcatgttaataatggtaaagtggtactaatgttatcgatatgttgactaacgtatgtcacccctggcgagctactgcatccgataacttatatgcttaatcgatatcgagatatacagattgtatacttcctccccaaaagaaaacatcccggaaaaatgcgacgccgcgaactgcagaccatccagctgaagctgtccgatctcaaggagtacgagcaggctaagatggagcgcctgaggaaccgccaacaattgcttactccccggacgcctacacccccttccgacagcgaagtcctgccggcgacctccagcagcgttccagctgttctcctggccagcggcaagaacctggacgatgacgccgacaagtcagagcccacaaccaagcccagcacatcctccacctagggtctatacttgagcaagcaatgtaagttttcacatacaaatgtatattatcgtttacatgggataatcgtccgcctggctgttgttgttgttttgaaatcgaactgtctcaaaaccgtcgacaaggatttcgcgatcctcggtttgttgtcggtcccgaagccactgctcccgcactggcacatatcgccggagtcccggcaactttctccaacatcgccgcttgtaaagaacccaaaccagcgatacactgcacccaaacaggaagcagatcaggaatatgctaatgccgcggccgtgtgacgctgtggctggcaagtctgtgatttctggcgaaagatccttggcctccctgctgtgaaacgcctgtaggcggtcctcgtcgctgcacaggctgattggcatgtagggcgtcatcacatcgccggccagggagtggacccgcacagcgcactcggtgaaagtgatgtttatctgcttcacgtacatgtagccggcactctggtgatccatccgcgttacacacccgacgtgggtttgcgagaagttgttgcgaaagtggattacgtagttggtcaccaggccattgggcttcttaggctcctcgaagcgcataatgtacttgtccatttccggaatatggcaggcatacagttgggtgagaagatcggcacccattgtatagttcgttcgtccgtagagcgttgtgtggctgctgcatcccagtggattgcaggcttgcagctgaagcgcgtacaggcgatagcgatgcagcgccttaagctcgtactccgtggtgtttcccggcagccgaagctgtggaagcgagacctcggtatgtgccagtcgtcggcactgctcgcgatcatcaagggtgcagcgatattgttccctcatgtccgcaatgaaacgagagtcctcaaactgctcggccttctgggcacaacagtcgtcgtagtcctcgtacgccatccacctggggccgtccatgtcctgccacacgtacgacggctggtggcagtagttcctctgttctatataatcctgatcatcgcttaattcgaaaaccgtcagaagaaagctaacatggtcgtgactggccatttgaaccgtcagcgagctatccgtcttcttgaccagctccagcaacggaggctttggtatgtccagctccgtctgcacgtaggtcaattcgctgcgtgcctcatacgcttcatgcgcctcatcattgccgaaagtacgcaacaggacgacataccgtgtgtccggttgaagatcatccaagtcgaaaagatagtgtgtgccattttcgatcagatcgtcggggaagagcaggcgtcgtttccagttgattcgtgtacatatgggcgcgtccagttcactttcttcgtggtatagtttccccggcaataaaggtcggtggatcagctcgatcttctggcttgtttgagacttgagccagcttagcttcacagaccgatgggttcgtttctgtatataagtaaaatagaaatttgcactttatttcttaagaaaagctacaagctatttacctgcacatatagctgcaatttcaaggggctgcactgcacctcctggtcgttggtctgcagggagtccagggctctatcatgggtcacagcgttttggaattctcgcatcctccggttgcacagtttgttgttgcgatgcatgaacatgccgccctccatgaactccagttgccgcgaaggtgtccacaactcggacagctccttgttgtcataaagtatgaaggagtagtggcgattctctaggggatcaccgtgaacgcgctctaggtttctcaggaattgcaagcttcttagctgggaggaactgcgacaagaaataagtatgttaaatggcagtgaaacagccaaggaaatcatacccaccgatagactttaacatgcccacgaacctcgcgcatactagtgaagctctggtacagctgcgtctcgttcaccttgttgcggattgtgatgaccaggctgccattgaagatctgacagccacgcaaattctctgcatcagccagattgtatacggtgaacgcttttcctggccactccggcgtgcagaagctgatacaagcctcatcggggctacagagcacgcactccgaccggttgttcgtcttgtagccgctgggacagaaagctacgcactgtgatccggaaataacatagccgtgctttagcacacactcggccttcgtatagcagcgctgatagttctccatgacgtacctgtaagacagtatgtctttatagagccggatgcgacagaaagtgttcactcacttgtccttcggacagctcttcacgcagacaccatcatcactgagtccgcggcaaacgctgcagtcagctggggatgatgagttgttcttgcagccgcccaagcactcctcatggcaggcgtttatgttgctgcgattgataagggattcgaatttaccattcaaggagagtataaacagttagtctgcattcatttccaataatactcacgcctttggattggcgacattttcgttgatggatctttggcagtaatgattcgaccagcagtgggaggaactgcatccagagcaaaccggtgtgctgcagtttttattcaccattattatgttgttctcgcctctggtgagagtcagcagatcccaattaacacggccgatgctgcagagcttggggcagctgccgatgtagacttgtcctcgttgtattgccaccaatttgggaaataccaactgggagttcaggagttatcgaaatggagattattttacacaagttttaaaaggaaaaaatcatgcaaatggttcagaattagaaatagtccaagaaatttgggatttcttcttataacacgagcactttaaggatcaatcttttccattttcaatggactgtacgtaggatctctcacctgttccagctcgtgcatgttggtcactccgagcgcgtagttaaggaacagccggcgaccccgaatgacggtcaggtgcgggaacatttcggtgatgttgaccaggccgcgcacgtcggtgaagatcatgaactcggtgatttcggtgagcagtgggtacgagtactccgagaaattgcagcgctgctcgatagtgatcagcgtgatcatcacgtatccggtgacaacggtgcagttgtccagcagatgcatgttcttgcactcgtttcggatgtcgatgctggtgcactcgtgctcctttttggattcggcgcaggggacatatagcgccaggaacatgaggccaacgcccagcagcatgttgccgcagtgcatgttgccaagcttgtacttgaaaagagttttgaagtttatttttcgcttatcctctttagcttcttttgccggcagcgctgtcgcccccacatattgcgacgcttctaccgaacctatgttttttttttcgatccgatcagcttacagttagttgtacatacatatgtagcacgcccaattagcgcccttactctccagcgtccatctgattaggaccgatatttatgacttgggcgctttttttgagctctcgctatcgttggcgaaatatcgcgcacggagggctcgctttttgttgttaaatctacgctaattattttggttcactgtctagatcggaagcgtaaacaaacacgttaccacacaagcgcattacgcacgtcaaaaacaattccttcgatcgtatttgtttattgtttgttttttaattggattagttttgggctcatgcagagcgatcttcggctcttatattcactcgcgggggttgccatacactcaaatcatcttttcctaatagagaactataaattctcttatggtatttgggcagaacaacagaacaactcatttcaagaaagcaggtctgcttgtctcaaattttcaaatattctttattagctcggcatcaggatcttgagcttgaaaaacaagtgtgttataaacatttttaaaaataacaatttttaaaatcactgataatttttgatagtatttttttaaatacagattctagcgattccgttttaaattttatacaataatgggcataaattaaatctttataattctaattctttaatagtttaaatacattttctttttaaatgtatatatttatattataatatataatatatttccaggggaattaacactttgatcgtcactacctcaatggatgaagcacttagtttttaagaaattgtattttgtaatttacactgtaaaaacatcttgtgctttttcgcgcactgcaagcgaaattagaattgatcgt

SEQ ID NO: 42839 - DNA, 2871 bp, DROSOPHILA
atgcactgcggcaacatgctgctgggcgttggcctcatgttcctggcgctatatgtcccctgcgccgaatccaaaaaggagcacgagtgcaccagcatcgacatccgaaacgagtgcaagaacatgcatctgctggacaactgcaccgttgtcaccggatacgtgatgatcacgctgatcactatcgagcagcgctgcaatttctcggagtactcgtacccactgctcaccgaaatcaccgagttcatgatcttcaccgacgtgcgcggcctggtcaacatcaccgaaatgttcccgcacctgaccgtcattcggggtcgccggctgttccttaactacgcgctcggagtgaccaacatgcacgagctggaacagttggtatttcccaaattggtggcaatacaacgaggacaagtctacatcggcagctgccccaagctctgcagcatcggccgtgttaattgggatctgctgactctcaccagaggcgagaacaacataataatggtgaataaaaactgcagcacaccggtttgctctggatgcagttcctcccactgctggtcgaatcattactgccaaagatccatcaacgaaaatgtcgccaatccaaaggccaacataaacgcctgccatgaggagtgcttgggcggctgcaagaacaactcatcatccccagctgactgcagcgtttgccgcggactcagtgatgatggtgtctgcgtgaagagctgtccgaaggacaagtacgtcatggagaactatcagcgctgctatacgaaggccgagtgtgtgctaaagcacggctatgttatttccggatcacagtgcgtagctttctgtcccagcggctacaagacgaacaaccggtcggagtgcgtgctctgtagccccgatgaggcttgtatcagcttctgcacgccggagtggccaggaaaagcgttcaccgtatacaatctggctgatgcagagaatttgcgtggctgtcagatcttcaatggcagcctggtcatcacaatccgcaacaaggtgaacgagacgcagctgtaccagagcttcactagtatgcgcgaggttcgtgggcatgttaaagtctatcgttcctcccagctaagaagcttgcaattcctgagaaacctagagcgcgttcacggtgatcccctagagaatcgccactactccttcatactttatgacaacaaggagctgtccgagttgtggacaccttcgcggcaactggagttcatggagggcggcatgttcatgcatcgcaacaacaaactgtgcaaccggaggatgcgagaattccaaaacgctgtgacccatgatagagccctggactccctgcagaccaacgaccaggaggtgcagtgcagccccttgaaattgcagctatatgtgcagaaacgaacccatcggtctgtgaagctaagctggctcaagtctcaaacaagccagaagatcgagctgatccaccgacctttattgccggggaaactataccacgaagaaagtgaactggacgcgcccatatgtacacgaatcaactggaaacgacgcctgctcttccccgacgatctgatcgaaaatggcacacactatcttttcgacttggatgatcttcaaccggacacacggtatgtcgtcctgttgcgtactttcggcaatgatgaggcgcatgaagcgtatgaggcacgcagcgaattgacctacgtgcagacggagctggacataccaaagcctccgttgctggagctggtcaagaagacggatagctcgctgacggttcaaatggccagtcacgaccatgttagctttcttctgacggttttcgaattaagcgatgatcaggattatatagaacagaggaactactgccaccagccgtcgtacgtgtggcaggacatggacggccccaggtggatggcgtacgaggactacgacgactgttgtgcccagaaggccgagcagtttgaggactctcgtttcattgcggacatgagggaacaatatcgctgcacccttgatgatcgcgagcagtgccgacgactggcacataccgaggtctcgcttccacagcttcggctgccgggaaacaccacggagtacgagcttaaggcgctgcatcgctatcgcctgtacgcgcttcagctgcaagcctgcaatccactgggatgcagcagccacacaacgctctacggacgaacgaactatacaatgggtgccgatcttctcacccaactgtatgcctgccatattccggaaatggacaagtacattatgcgcttcgaggagcctaagaagcccaatggcctggtgaccaactacgtaatccactttcgcaacaacttctcgcaaacccacgtcgggtgtgtaacgcggatggatcaccagagtgccggctacatgtacgtgaagcagataaacatcactttcaccgagtgcgctgtgcgggtccactccctggccggcgatgtgatgacgccctacatgccaatcagcctgtgcagcgacgaggaccgcctacaggcgtttcacagcagggaggccaaggatctttcgccagaaatcacagacttgccagccacagcgtcacacggccgcggcattagcatattcctgatctgcttcctgtttgggtgcagtgtatcgctggtttgggttctttacaagcggcgatgttggagaaagttgccgggactccggcgatatgtgccagtgcgggagcagtggcttcgggaccgacaacaaaccgaggatcgcgaaatccttgtcgacggttttgagacagttcgatttcaaaacaacaacaacagccaggcggacgattatcccatgtaaacgataatatacatttgtatgtgaaaactt

SEQ ID NO: 42840 - protein, 946 aa, DROSOPHILA
MHCGNMLLGVGLMFLALYVPCAESKKEHECTSIDIRNECKNMHLLDNCTVVTGYVMITLITIEQRCNFSEYSYPLLTEITEFMIFTDVRGLVNITEMFPHLTVIRGRRLFLNYALGVTNMHELEQLVFPKLVAIQRGQVYIGSCPKLCSIGRVNWDLLTLTRGENNIIMVNKNCSTPVCSGCSSSHCWSNHYCQRSINENVANPKANINACHEECLGGCKNNSSSPADCSVCRGLSDDGVCVKSCPKDKYVMENYQRCYTKAECVLKHGYVISGSQCVAFCPSGYKTNNRSECVLCSPDEACISFCTPEWPGKAFTVYNLADAENLRGCQIFNGSLVITIRNKVNETQLYQSFTSMREVRGHVKVYRSSQLRSLQFLRNLERVHGDPLENRHYSFILYDNKELSELWTPSRQLEFMEGGMFMHRNNKLCNRRMREFQNAVTHDRALDSLQTNDQEVQCSPLKLQLYVQKRTHRSVKLSWLKSQTSQKIELIHRPLLPGKLYHEESELDAPICTRINWKRRLLFPDDLIENGTHYLFDLDDLQPDTRYVVLLRTFGNDEAHEAYEARSELTYVQTELDIPKPPLLELVKKTDSSLTVQMASHDHVSFLLTVFELSDDQDYIEQRNYCHQPSYVWQDMDGPRWMAYEDYDDCCAQKAEQFEDSRFIADMREQYRCTLDDREQCRRLAHTEVSLPQLRLPGNTTEYELKALHRYRLYALQLQACNPLGCSSHTTLYGRTNYTMGADLLTQLYACHIPEMDKYIMRFEEPKKPNGLVTNYVIHFRNNFSQTHVGCVTRMDHQSAGYMYVKQINITFTECAVRVHSLAGDVMTPYMPISLCSDEDRLQAFHSREAKDLSPEITDLPATASHGRGISIFLICFLFGCSVSLVWVLYKRRCWRKLPGLRRYVPVREQWLRDRQQTEDREILVDGFETVRFQNNNNSQADDYPM

SEQ ID NO: 42841 - DNA, 7775 bp, DROSOPHILA
agaggaagcggaggaaaaaacgagaaaagttttcgcttcctggcaaaaaacaaaaacaaaatcaaaacaaatcttttctgacagctccggcaaattctattaatgtgcagacttagctgtctgtgtgagtgtgagtgcgccccagaatggctatgtgtgcgtgtgtgtgtgagccttggaaattaaattgaattattttatgcaccctagaagccttcttcattaagagaatcgaatcactagaattcatcaacagtgtatatacatatgtatatataaattcaactctcacttttgtacagcaagctttaatcgggcaaaaaaaaaaactcccatggttgtacatatatacatatatattaacggttacgtacataactgtcaacatctcgatatatccaaatgccaaaaatcaccccctctccccaaaaaaaaaaaaaaaacaataaatatattgaaagaaaccaaattcccatgaaactctttttggaccactgtattgtgtgcgctcaccagtttactcgtccatttgttgttaatctcgttttcctaaatgcagaatgcccattctaacttttacttttcgtttccacaattgttttttctttcgtttccgtttgccttactgtttttattttagttttttttttttttttttttacgatatgcgtttgactttaacgttctactaatttaaccagttttacctgtgccagtttagttcttaatggatttttatagtttatttttgaacattaagccaacaatacgatatttttctctatctctctttccctttcatttaaaatataaacgcgtgtattcaatttgacccctgaaactgaaaatgaaactgaaacttcaactgattaaatccataaaaaaaaaaccataaccaattcaaatatatatatatatacctttatatatatttcgaacgaaacaaatgtatatgaaaaaaaaaacaaaaaatataaacgcgtgctggtttatggaacagatttcatgatgaagaacacgcgaatcttttgaatgcaatgtggctgatagcgataacatttttgagtgttggtttcggtgatattgttccgaatacgtactgtggacgtggtatcgctgtcagtacaggaataatggtgagtttttaacaacaaaatattaccaacaattgcacacaacataacaatcaagaaatatgtattaaacaaacaaaaaaaaaaaaaaaaaccaaaaaaaaagaaaccgaaatattatttaaaaaccaaatgtttcaaactagaacagatatcacgtgtaaataattacataaactgcatacgaatgtttacccgcccaccacaaccgcccctcgccgccacttttaatatgaacacaatgataaatctaaactcacctgaatcgtcaaatttccagttaactgtacatacatatatcaaatatctagatgaatcaccaaaaaacaaaagcttaaaaacctcaattagaggcgacaacctaaccgcatgttttcagcctgagatcaactgagatcagattgagccattttcgtgccccaaaaagtctgaagtctagcaaagatcgagaaaacccaccgaccataaacgtcgtttcacaaaaatcgcagatgaggcatagtgaacagtataggaatcgaattaaatacgtattttccattcttctatctctcttcaccttttatccagttatctgcttttgtgtggcttactttcttctctcgctctctaccatctacatatatgctacatatatttcgattttacccactatcggtcgtatgactatctgcttatttcttagactttttgagatatttatcatgtcgtagtggccaaaataaccaaagtataaaaaaaaaaaaaaatgcaaaaaaaaaaagaaaataagaacaaaaacaaacaaaaagtaataaaagctatgatagatatttccgtacctaacttgactatgaatcgtgatttatggttttaactttgttccctagctaattgtttcgtacttatgtgtgtatgtaactctctgccagacacctctaactgttgtattacatatagatagacatgtgccgaaaccgaatcgattaactcttttgatattactctaatccgaaatctaatctaaaaccccacatccaactccgtatctgaaaactctaatccaaaattgttgctgcatttcaatcaatcccatctacatcgtaatttcaattagaagatagccattccagtcattcaaactcattcaatccactcacccattaatcgttcaaccatcgagaagcaaatgaaataacaaagtgaacaaatagaagaaaaaaaggaaaaaaaaaagaaaaagaaaagaaccaactgaaacataacatatatacatgttgtaacatccataaaagtactatatctattgtgagagcaacaacaaaagttctggactatataacttgataaacaaaagcaactttcattttgaatgcataaacgaaaagtgaaaataaccaactggcattacagatggccgggcacccaacccccaaaaaccacttaaactacccactatccacaaaaaaaaaaaaaataaataaataaattaagctagcatcagagaaaatgagtgcaattgtgtcacaattaagaaaattgcctttgaccatttgccaatttcagctaatttggccacatttcttttcttcaacgagtgtggcgaactggtcattatatttcacacgtacttatttctatttttagccagtaactggcagtatttcttacaactataatcatagcaatcgataaatataattggaatttgtttaaaggtatattgtggaaattatttaacggtagaaaagaaacatattaaagataactcttttttttttttttttttgataaaataaaaatattaaatcggatatttattaaataaccgctttggtaactgactgaattaaatagatctactaaaatgcacttacggagttgggtgtccgggagtcccagatcccagatcttgaatctcagatctcagatcttggatcagttcgaaactcacctcggttgcgcgcgctattcgaaattcaatgcccaaactcaccactctacatgtcgtcgttgcagggcgccggctgtacggctctactggtggccgtagtctctcggaaactggagctgacccgtgctgagaagcatgtgcacaacttcatgatggacacgcagttgacgaaacgggtattgatcgtgttccaagtgtcatgactctgatccgattcgaattgatccgatgcgacgtatcatatatatactatataacgaataccacatcaaaaatcatataccatgtaccccatttatatacatatgcattctaattactttgtatacgtttcttctttggaccaaaatttagctgaaaaatgctgcggcgaatgttctgcgtgaaacttggctcatttacaaacatacaagactagtaaaacgggttaatcccggccgtgtaagaacccaccaaagaaagttccttctagctatatatgcgtgagtatttttagagatctatcaacaaacaatcaaccaaacaaccaaccaaccaaccaaccaaccaacaactaagaacaaataccaatcgaaaagataatgactaaaacaaaaaaaaaaacaaaaaaagagtgcctaagaacaactaaagcaaacttaaagccaaattgatatcagatcggtatagaagttttcgggtctttggaatggggaaatatcattggtcgtctctgtttgtttatgttctgtctcttttttgtctctcagtctacattttcgtgaaactaactatcatttgtccacataaatccctctgtacgtactatgtttgtcagattagctaacaaaataacaatgaaaatcactgtcagttcgcaaaagtaaccctgtactgctgttgcccccttcattattagactcatcattgtgcccatcaataaacgtagaaaagctttgggaaagccatccatcagaatctgtacatacatccgtacgaaaagaaagtaaaacctaaacgcaaaaaaaaaaaaaaacgaaaacaaaaacgaactaatcaaaatactaaaaacgataataccaagtactaaactaaaatgttgaaaccacaaatgattgaactcgttttactagcctgtaaataggttgtaaagccctgtttttacgttatgcaataaccgagactagccacataacctagcatgctgcgttaaatattctagaatctcgtatctaaaactatcgcaaatatcatctgtgcttttgcctagtgcccagtttcatatacaatatcatacattattaactaactgcctaatgaacgaattaaaatatatttacacagcattccatagcattcgtaacacctgaatcatgttgtctgtccaaaaattcaaaacgtaatccattccaccgaatcctgtgaaacgtcttagttccatccaagcgcccaattattttcatacgggaaatggcttagggatcagccgaatgatatgatgatattttcacgatacgattttctgcaattttaacgcccgaatatggacttttttcctactccaaaataatccttctatcaactacggcacaacgaattctacacaccaaaaaataatattttcagagaactctatctaataactgtgtgattcgaagctaagaaaaaataaaacacaaacattatattctaattataacgtttccaagcactctgttatctattggtccgatgtgtaaatatatatggtctatttgtgtgaatcttatgaatgaaaagtgagttttcggctaaacgaaacgaaaaacttttccacaaaaaaaaaaaaaataataataataatcgtgtgtgaatgtgggtattttgtgagaaaagccctaattagtaatgttatgtgttggcgatctatcatattttatttaaataatgttctctgtaatattgatgactcttccaatgcgatttaggttgcgaaaagttaaaatggatcagcgcaaactaatggataatgcaaacacaataactgacatggctaaggtagctatagaacagaactgaaaacatacaatcgaactttgataatcgtacacggatcgataacttacttagcttagtcatcgatgtttccgatacatcaatttcctaatcgcttgttttgttagagttattttattccatcgtgaaagttaaaaagagatttaattaatcaaagttcgaatgtgcagctttgtgtaactgaattcacgtcaaatgtgaatgagccgataagctatgcatgtttgtgattgtgtgaataccattcgcagacacaaaacacggtctacgagataatatcggacatgtctagccgtcaggatgccatcgaagagcgtttaaccaacctagaggacaaaatgcagagcatacaagtatgacaaacaatcgagagtgttgtatttgcccagtgatttacttacgcccacaccaaacgcactggtgacatatatttgcaggagcacatggaaagccttccagacctattgtctcgatgtctgacccagcaccaggagcggatcgagcagcggcggaactttttacatcctgacacagctgcagttgcccccattcaagcgccaacgccccaatcgatgttcaatgcagcgcccatgctgtttccacattctaggtgagtctcgcctctcttctctcgccactctctctctctctctctctgtctgtctctgtctctttctttgtctgtatctatctctgtctatgtctatgtctataagccatgtccattatcctcatccacacgcacacatatacatatgtatgccaatgccattaaagcaagacttgtgcctgtcatttcaatttgttttttgttcgttgtctgcgagtcgtttgtctcctggacgggagaattgggggtctccacattccagaactccatccatcctatcatcttgcatactcatttgtaaatatatatatgccgtagttgtccattgcacacacttgattcctccaaattacatcccaagtcccggtggctacccaaaaaaaaaaaaagagaaataagaaacgtcttctatgcaagattcaagtgatttaagactgtgattgaggaaattatggctttttttttttaatcaatcatcaataggaatgatcaagcaatagcaattacttgaccgtttctaattttcttttaattataatttgtattgaaagatgatatctttggacgaacactaactgcagggttttcaatttaccactttttctttattgactcttcatggctttccaacgctctgacatttcacgatttgcatcgaatcaaaccatcgccattaaactaaacaaaaagaaaaagaaataaaagtttttatttattttgaaaagtgtactcaatgataacgacaattaacatactgctttttgcatagaagtgttccctcatccaataacgccgctgctacttaccattggccaacaagccctattttgccacctatatctagtagaacaccacatttagtgcctgatactcacatgccatcaaatggatctgcagttaatagctacgcatcttccaacaaatacggcagctgaatatcagaaagagagcgctccaactccgtgattaacatcgagatgctaacaataaggccggatcgattctggccaacctcattcgcaccccaaaaaccaacatcaacatttacatcaacatcaatgtctacgtcaaagtgtaaacccgaattcgaagtggccgagacagcgctgaggcaacgcgtgctatcgccgtcgttatcggagtttcaatcgaaatcgcaatcgagaccatcgtcacaaacgcaagagcacattttgcaaagggagatcataccgatggtaccgatcataccgatcataccagtgataccggaggacgccgaatcgttgggaaacaccaatacgaacagcaacagttcgcccgatcagcagaatgtgcccatgactataagtacagtaccgccatcgagttcagcgcccgcattcacagcgaccggaagcggaggttcggtgaccggaactagcggtggcattgtgaaatcgataacgatgaacgaaccgattacgacggggagcggcaagccgattgcctcgaataagtttactaggaaaagagaacgtgtatgcaataatagtagttaatagtagtagtcatagttatagtaataatagaggtaaaagtaatattagtaattctacaagtcgaatttcgaactcggccttttgtaaataagcctcttcgagatgagaaaaaagtcaaatgttagcatatacatattaatatacagaatacacacactatgtatcctatatctgtatacggatatatataggcctccccacaaaacatccaaaaagaaagcaaaaaaacaataagcgaaaaccgaacagaatatatgtatacatatatatgtcattgtgtaactttttttttttgtctaagttttaggctaaacgtatttgtaatatttcaccttgggccaaggcagcctgtacatgcatactaaaatacttaacataatatagcatgtaggggggagtgtatgtgtgtgtatgtgcatgggagtgtgcgaatgcgagtgtacaggaccagattggtaaggaagttaggtcatatgtaggacatagatcgtagggcaccagcatgtagaatccacgtatataaacgctcagaaatagcaacagaa

SEQ ID NO: 42842 - DNA, 1016 bp, DROSOPHILA
atttcatgatgaagaacacgcgaatcttttgaatgcaatgtggctgatagcgataacatttttgagtgttggtttcggtgatattgttccgaatacgtactgtggacgtggtatcgctgtcagtacaggaataatgggcgccggctgtacggctctactggtggccgtagtctctcggaaactggagctgacccgtgctgagaagcatgtgcacaacttcatgatggacacgcagttgacgaaacggctgaaaaatgctgcggcgaatgttctgcgtgaaacttggctcatttacaaacatacaagactagtaaaacgggttaatcccggccgtgtaagaacccaccaaagaaagttccttctagctatatatgcgttgcgaaaagttaaaatggatcagcgcaaactaatggataatgcaaacacaataactgacatggctaagacacaaaacacggtctacgagataatatcggacatgtctagccgtcaggatgccatcgaagagcgtttaaccaacctagaggacaaaatgcagagcatacaagagcacatggaaagccttccagacctattgtctcgatgtctgacccagcaccaggagcggatcgagcagcggcggaactttttacatcctgacacagctgcagttgcccccattcaagcgccaacgccccaatcgatgttcaatgcagcgcccatgctgtttccacattctagaagtgttccctcatccaataacgccgctgctacttaccattggccaacaagccctattttgccacctatatctagtagaacaccacatttagtgcctgatactcacatgccatcaaatggatctgcagttaatagctacgcatcttccaacaaatacggcagctgaatatcagaaagagagcgctccaactccgtgattaacatcgagatgctaacaataaggccggatcgattctggccaacctcattcgcaccccaaaaaccaacatcaacatttacatcaacatcaatgtcta

SEQ ID NO: 42843 - protein, 282 aa, DROSOPHILA
MWLIAITFLSVGFGDIVPNTYCGRGIAVSTGIMGAGCTALLVAVVSRKLELTRAEKHVHNFMMDTQLTKRLKNAAANVLRETWLIYKHTRLVKRVNPGRVRTHQRKFLLAIYALRKVKMDQRKLMDNANTITDMAKTQNTVYEIISDMSSRQDAIEERLTNLEDKMQSIQEHMESLPDLLSRCLTQHQERIEQRRNFLHPDTAAVAPIQAPTPQSMFNAAPMLFPHSRSVPSSNNAAATYHWPTSPILPPISSRTPHLVPDTHMPSNGSAVNSYASSNKYGS

SEQ ID NO: 42844 - DNA, 5053 bp, DROSOPHILA
atattaaacatatattccagtttttggtgttaaaaaaagattttacaattttttttgctttgcttttccattaaattaatttaattttatcagggtgattttcttttttattttaattactctcacgaaatgccaatctcagcattattttatttcttactctaatttctctctgtgcacccactccagttagaaacggagttgacctactttgccatgtgcgctgcccaaaatagaggatccgcctcgatccgttgtctatttcgggaggtgtttttcatttcacttattttcctttcactaccttacccgaaaaatcataatccgaaagaggcgcaggcgattcttagttgccctaacccgaagtagccaggtgctataaataaaatgcgatcgcgcatatacgcgtagctgctaggaaagagagctataaaaaacaaggggttgctgatcgaactggggataccctcgttagtccactacctctgctcggctgcgggagaagctgaaacgaaagcaatttgttttcaccctgatccgttgatacaataaacaagttggcgcacaggcagcccatgaatgaaaaacagcgaaaaataaaattcgttttttttttgggcagaatttcttgcttcattttggctgccgcattctgcgtagcgttgtggacctggccgagtggtgaggggtcttctatatggccggcaacaagttggatttttctaaaaatgaacacacacgaaatagcttcgtctttggcgttaaatacggaccacgacaaccatcggtgtcgagcagcgacaacgcatctccgcatcttcgaagagcggcggaatttgatttgattttcacttgcccgaccgtccgcgctattttcctatttccctctattgtgtgtggggcgtgctctccgcggcggtccatctaaggagcatattccgaagaagcgatgctttccgcgactcggctttcccgcaactagttgcgttttggatgtcaacacgatgtgcacgcgcacagcgtcgattcccgtcgaccaactgccactggcagcgtgaagtgaactgtggaccgtggcgatttgaaggtgatctcaatcacccggcattactaggacagcttgagccaagactgaaccggcgagggaaccggaacagaagatattcatttttccagggcaccttaaacgtacaaacgatagaatagcaaggtaaatatgatagttctcgattagtaatcgttattctatgtatgtggatacagcaaatacccttcgccatccattcaggccgggcctttagaccttttatgggcatgcttttcgcccagggaatcgaatttcatgcacaaaaacaacatttcggtttcggggcaaaaatcgttgtgcgtttgtgtgtgtttcgcctgagagagcgccacttgccagttcctcttggacatttaaatagaattcccgtgctggccaccgatcgagagagaaacagagattgagcaccctcctcctcctcctgcgtctccgtgaatgtgttcctctgccggcgagcatcaaaataacaacacaacgtgtttttcgtgtctctcacatcgcgtatacgcaacgtataccaccatttcatatttacttttaacttactacggttaaaattacagcttagtttagatgtgttttccatagtattttccggtaagcgtttggaacattacactatttccttttattaccgtctatgccagtcaatggttcgtatacgcaatgtgttgtctagtttgaatttcgaaactgtatgaaaacaagtctttgtaataagtgatgtaaatatgaaaagttttatattaatttaaaagcatataaattggaagattatataaataataataaaactatctttctcttacttttttttagccgaaatcaagatcagcatgcaagaacttactaggatctgcgatcttaacggaaacgcagacaagggagagttgggtccggctaccaacaatctggaccagctcctacccagcataaagctggagcacgatcccgacttggagtgctggctgcccacgcccgagcacccacaactccgtctggatctgaacagcacccgtctgctgctgcagggctccgacgacccattgatctcgcatggcgccaccaacgatgcccacgacgaagaccatcccttcaagacgctactggcccgcaaaagtgccggccacgaaaccccacacaatggcacctgcagtccactgaccaagcagcagctgaaggccaatctgctgatgggcagccggaaggcgaaccgacagccagcgcaggagcagccacacactgctctaccacaaaagacagttaggccagtgcacagccagggtcaacagcgatcacgtaagcgaggcgatgcgggagccatgaagcttcgctttcaccaccaagctctgcccgccgagtatgccgcccattacgaggccacgcagggtcgccagcaaccaagaccagtgctaccaccgccagctcctccgccgagtcaggctcacgagaatgtacgcagttggctgcggaagattgccgagatccagcgcaatgccgaacgccagcaacaaaagcagtctgccgctcctcgagttggagcaccaacttcgcgatcttcacccatcgcagcgacgtccgtggtaccaacaaaaaattccgaggtaacaactgcctccaagcggaactccctaaaatacgcagacctgccgtacatgggtgagattacgctggacaactacaagccacgtcgtggtcggaagcccaagaaggcggatatttgtcacctgatctacaagaactacggcaccattgtcccggcatctgtgcccgcgatgccggtcagtgctgctccgccgccgtctacctccacgattgcggtgccacctgaggagccgctgaatctctgcctgcgtgaccagagcggcgatcgctactcaatatccagcggcgacagtgagaagccgcgaactacaccaaatacgaccacagctacgacagattgcggcagctcctcgcatcggaccactccacttagtacggtaaaacctctgaccttggagctggcagggacggaggaacagcctatgacagcagccaagttgcttctccaaccagttggactgtactatcagcagctcgtcgagtcctgcagcctgggaggtttgcctgtgcccttggagaccatcgagaaggacaaccagctatctcttaagattccgataccaagcggattctttgccaatgagaccacgcccctggccatgcggaaacgaaagcggtcagcaatctttatcccgcccatgcccgccgagcattcgtcgagtccctcgaacgaagtgagcatctgcaagtttaagttcaccggtggtgccaagcccacgctgcaggagaaaaagatgctctcggtggacgcggagggcaattaccggtattacaacggcacaggagacaagaccatgcgaggctacgagttcatctcccgggatcagcagcagcagttgcagcaacaccagcagccggcacaggagaagctctacgtggatattccagctccatcgacagacctcagcccagagttgctgcacatatcaccggagtcacccacctcaacgctgctcctgcccagcagcaaccatctggtggccgccgtagcgccccatagtccagcctcccagtgctccagctcccagagtcccatgcccggagcagtgtgtcccggtcacacgcaaagtaagtcctcatcagagagcgaacgtaagcgaagatcctccaagcgatcaaagcagcgcgaaaagctggagaaaaccttcaaagagaaaggctttctcatccaaacccagcagcttcaatccgccgaaggtgctacctattgcaaatttagacagctaaagaagttcacgcgctaccttttccgcaactggaaggatcacatacccgagagcgatctggccaagcaccaaaatgcctcgcgggaggataggctgccaaatctggaaacccaaaccgccaaccagacgacatagagctgcggccaggacattcaggaaacatccacacacagcactgccaaagatttaagtttaagatcagctaatggccggcccagcttcggttgcggttgccagttgagggtggagaacagcaacccatgccgattccgtccatgcgggctgtccaacaacgcgatcaatgatcctcagccacgcttcctagtcgttcatcagtttttttagtgcctaataaaatgttattgttaacaaataaactcaatgtttaaccatatgcaaatgtatattgtttggttgtaaaaggcatcgtagtatgtattttacaaaatatccgtcaatacagttatgtgttagtacaaaagataaactccaaaatgggcgataagtctataggggttatgctcgctctcaaggtcgtttcaatgccattgcgaatacttcttgttatcatcgttatatgcttatttagaagatgtcattacatcccgtttccagattagcctaaatgttagttacagataatataaaaatttccaaaatgtttgctggtatgcttaggtcgacgaaagaattttgactcgaattcattcgaaagatgtttggaagtttgggcgtggccttgataagataaattctcactaatattgtcaattttgtggatttggttgcataattggttcaggtggcagttcattcagtttggggatccttggccaggttttgggcttacaactaaaaaacatatttgctttcaatcgatttgtgctcctttcgacttcgtctttagttcgaactcatggagctctcatgctccttagccgtatcagctagatatgtctccggcacactggcattcatgggacacacgtactccgtccagtctacgtcactctggctcttcgagctcttgcgacgctttaacgaaaactgtgtgcgtttcaccggcttcagcttagctgtaatgcttagcggttggtacccgggtgccgattcggcatctcgcttactcaagatc

SEQ ID NO: 42845 - DNA, 2357 bp, DROSOPHILA
cacgatgtgcacgcgcacagcgtcgattcccgtcgaccaactgccactggcagcgtgaagtgaactgtggaccgtggcgatttgaaggtgatctcaatcacccggcattactaggacagcttgagccaagactgaaccggcgagggaaccggaacagaagatattcatttttccagggcaccttaaacgtacaaacgatagaatagcaagccgaaatcaagatcagcatgcaagaacttactaggatctgcgatcttaacggaaacgcagacaagggagagttgggtccggctaccaacaatctggaccagctcctacccagcataaagctggagcacgatcccgacttggagtgctggctgcccacgcccgagcacccacaactccgtctggatctgaacagcacccgtctgctgctgcagggctccgacgacccattgatctcgcatggcgccaccaacgatgcccacgacgaagaccatcccttcaagacgctactggcccgcaaaagtgccggccacgaaaccccacacaatggcacctgcagtccactgaccaagcagcagctgaaggccaatctgctgatgggcagccggaaggcgaaccgacagccagcgcaggagcagccacacactgctctaccacaaaagacagttaggccagtgcacagccagggtcaacagcgatcacgtaagcgaggcgatgcgggagccatgaagcttcgctttcaccaccaagctctgcccgccgagtatgccgcccattacgaggccacgcagggtcgccagcaaccaagaccagtgctaccaccgccagctcctccgccgagtcaggctcacgagaatgtacgcagttggctgcggaagattgccgagatccagcgcaatgccgaacgccagcaacaaaagcagtctgccgctcctcgagttggagcaccaacttcgcgatcttcacccatcgcagcgacgtccgtggtaccaacaaaaaattccgaggtaacaactgcctccaagcggaactccctaaaatacgcagacctgccgtacatgggtgagattacgctggacaactacaagccacgtcgtggtcggaagcccaagaaggcggatatttgtcacctgatctacaagaactacggcaccattgtcccggcatctgtgcccgcgatgccggtcagtgctgctccgccgccgtctacctccacgattgcggtgccacctgaggagccgctgaatctctgcctgcgtgaccagagcggcgatcgctactcaatatccagcggcgacagtgagaagccgcgaactacaccaaatacgaccacagctacgacagattgcggcagctcctcgcatcggaccactccacttagtacggtaaaacctctgaccttggagctggcagggacggaggaacagcctatgacagcagccaagttgcttctccaaccagttggactgtactatcagcagctcgtcgagtcctgcagcctgggaggtttgcctgtgcccttggagaccatcgagaaggacaaccagctatctcttaagattccgataccaagcggattctttgccaatgagaccacgcccctggccatgcggaaacgaaagcggtcagcaatctttatcccgcccatgcccgccgagcattcgtcgagtccctcgaacgaagtgagcatctgcaagtttaagttcaccggtggtgccaagcccacgctgcaggagaaaaagatgctctcggtggacgcggagggcaattaccggtattacaacggcacaggagacaagaccatgcgaggctacgagttcatctcccgggatcagcagcagcagttgcagcaacaccagcagccggcacaggagaagctctacgtggatattccagctccatcgacagacctcagcccagagttgctgcacatatcaccggagtcacccacctcaacgctgctcctgcccagcagcaaccatctggtggccgccgtagcgccccatagtccagcctcccagtgctccagctcccagagtcccatgcccggagcagtgtgtcccggtcacacgcaaagtaagtcctcatcagagagcgaacgtaagcgaagatcctccaagcgatcaaagcagcgcgaaaagctggagaaaaccttcaaagagaaaggctttctcatccaaacccagcagcttcaatccgccgaaggtgctacctattgcaaatttagacagctaaagaagttcacgcgctaccttttccgcaactggaaggatcacatacccgagagcgatctggccaagcaccaaaatgcctcgcgggaggataggctgccaaatctggaaacccaaaccgccaaccagacgacatag

SEQ ID NO: 42846 - protein, 709 aa, DROSOPHILA
MQELTRICDLNGNADKGELGPATNNLDQLLPSIKLEHDPDLECWLPTPEHPQLRLDLNSTRLLLQGSDDPLISHGATNDAHDEDHPFKTLLARKSAGHETPHNGTCSPLTKQQLKANLLMGSRKANRQPAQEQPHTALPQKTVRPVHSQGQQRSRKRGDAGAMKLRFHHQALPAEYAAHYEATQGRQQPRPVLPPPAPPPSQAHENVRSWLRKIAEIQRNAERQQQKQSAAPRVGAPTSRSSPIAATSVVPTKNSEVTTASKRNSLKYADLPYMGEITLDNYKPRRGRKPKKADICHLIYKNYGTIVPASVPAMPVSAAPPPSTSTIAVPPEEPLNLCLRDQSGDRYSISSGDSEKPRTTPNTTTATTDCGSSSHRTTPLSTVKPLTLELAGTEEQPMTAAKLLLQPVGLYYQQLVESCSLGGLPVPLETIEKDNQLSLKIPIPSGFFANETTPLAMRKRKRSAIFIPPMPAEHSSSPSNEVSICKFKFTGGAKPTLQEKKMLSVDAEGNYRYYNGTGDKTMRGYEFISRDQQQQLQQHQQPAQEKLYVDIPAPSTDLSPELLHISPESPTSTLLLPSSNHLVAAVAPHSPASQCSSSQSPMPGAVCPGHTQSKSSSESERKRRSSKRSKQREKLEKTFKEKGFLIQTQQLQSAEGATYCKFRQLKKFTRYLFRNWKDHIPESDLAKHQNASREDRLPNLETQTANQTT

SEQ ID NO: 42847 - DNA, 3404 bp, DROSOPHILA
gttgcagttgctcttccttggtacacaactgctggctcttttccgttatcagaccctccagctcgataatcttgtccgcttgttctgacactcgttccgccagcatctgatactgcagggctaagccctccttatcccgttgcaggcgacgcatacgctcgtcggaatcctgacgaggtatgtgcgtctccagccagtcgctgataatggccgccgtgacaggatccggtgctggagcagccagtccgacctaaagtgataagcgtaagtgtaagccctccgtttctagaccttatcatagtcagtgtgactcacctgttgcagggcgagagccaaagtcttagctgttgacaaaacattagtggccgaaattaagttgcgttcgctgagtgtcagggaagaccctgctccggatatagaaacggatcccgcctgtgtcgcggtactcgatataaggccgtccatttgctgtaatgctgcctcgagcattttgctgccctccgccacagtcgccatgaagtccaaatcaaagtctcgctaatcccgggtgatcgatgtgtggtgtgcttattgcgcgactagtgcattgttatgtaagcaggtcaggcagggcacgtcattttgcactggtttaggggaaaatggcatttatggttattaatttcagcactaattggggaaaactatcacgaaaatagaagctgctgcaccgttctgcttcttcttctcgcacaccagcccagccacttatcgatagtcagcgaacgcagaattgtgtgtaggagcaacatccgatagtttgctagatggtctaaagtctacaaaacaaattttaaaacaaaattaattttaagtaacgtataaaaatgcctaaacacattttaattacattttttggggacaaagtatgcaatatatctagatgtgtacagctatatttggttttccatacccgatatctactgtacaaaaaagataccatcactaataagcaggtggaacggtggagtcacgaaagatgtgtcatctccagccagagccacaacaaaacaaatattaaggataaaataacaaatatctgaaatgaatcgcttcgcttatgtggaggcccgtctgagtcccaatgaatccttcgtcagccgcgacaacagggtaaaaatatacgatggcgaccaaaaggtgagcagctagtgaattcgcacaatacgaaaccgggtctttattagactcaaatcctttcagacggactttgaagacggcgaagtggtgctcaccacacaccgactgttttggggtcgccctggagagattgcccgggccgccgtaacactttgcctgccactcagctatgtgatatccgtcagcgaagagactactgcctctaacttctttggccgcaagactcgcataatcatgcatctgcatcctccaacgtcggacaaaggacccggcccactggacaccagtcgcgccacccacatcaaactgtcgggcaagaatggcctgagtgtcgagttccacagtgccttgcgggagactctaaatgcccgcgtctgggaaatcctcttgaccagcgagatcatcatcaatggcgtggccagcagtccaaccttggagcctgccaacgacaggctggcccgcattcagaagaggacaggaattgggggcatcgaacggcatttggaggcaaaagccaaggccacggatgagaacatagcacttgcctttcaggatctcagtgttctaatggccatggccaaggacatggtaggagtgtccaagacaataagcagcaagatacgcgaacagaagggagaaatatctgacgatgaaacggtgcgtttcaaatcctacctcatgagcctgggcatcgatgatcccgtcacgcgggacaactttaccagcaattctgcctacttcagtagcctggcccgacagatttgcgaaatgctgctggatcctatcgaggtaggaactgtattaaaaagttatactttgtattgacacttactttattaccccttaggagcaaggtggcatgatgtccttggctgatgtctactgtcgtgtaaaccgcgctcgtggtctggaactgctatcgcctgaggacttgctgcacgcctgcgagcagcttagtggtccaatacgcctgcgcagctttcccagtggcgctagagtgctacaactggagtcccacgatgatgccctaattgccgttgacacattggagaaggtggaggctgccgagtctctggctgtggaggaactggccaagcagctgggaatttcactcctgctggccaaggagcgattgctagtggccgaacgtttgggcaaggtgtgtcgcgacgagtccgtagagggactgcggttctatccaaatcttctgctaggccgggactaatttcaatgtgaatgtgtgcttgttgttatggttaataaagatatttgactttttatttaaagcaggagttttgagtagaaagtgaatatcctttaaaggtccttaccattttcagttccatcgcaatgacaagactgagttcttaatttcatttcacactttattgattaacggagcttctgctttgactttgtcggcgcttcattaagttattttggttttgtcgtgattattttcatttttgtttagtattctcaagagttttattcgtaatcagtttaatgaaaagtttctacagtcaggtattttgataagcagttattgaattgaaattacacatttatattaatagtggttttcgtgtttacatatatataaatatattatgctgctgcttagattgctccgcattacattaataaatctttgaattacgtttcaataaccatttgatcaggccacattaccgcgcatgtatgtatataactttcgtactcaggattttggccaattgcttgagtaacattttcccacttcgttatgctttcaatcattcattcggtttacgtagtaccatgctttcattttcgtttattcatcttaaatcacatttattaattaatattaacattgagtagtttatgcttgagtgtgtgttggatacggtagggagtacgggtagtggtgaggttaatttgtgttttatttcttgctggctgaagaggtttatgcagaggtttactttaagtgctgcgcagctgaatcaaacaatgataaacaagtacagcactctaggcggtagtaacataataaaatcgttacttaaataaataatgtccatctacaaaaaaactggcttaggtgaaaaacaaatatgctttgtcgaaagcgacacttttacacattactcgactcgagttggcaacttttccatcgtccaagctcattcagctgctcctgtctctagtttcattgtacattgagctattacaaataaatt

SEQ ID NO: 42848 - DNA, 1283 bp, DROSOPHILA
acggtggagtcacgaaagatgtgtcatctccagccagagccacaacaaaacaaatattaaggataaaataacaaatatctgaaatgaatcgcttcgcttatgtggaggcccgtctgagtcccaatgaatccttcgtcagccgcgacaacagggtaaaaatatacgatggcgaccaaaagacggactttgaagacggcgaagtggtgctcaccacacaccgactgttttggggtcgccctggagagattgcccgggccgccgtaacactttgcctgccactcagctatgtgatatccgtcagcgaagagactactgcctctaacttctttggccgcaagactcgcataatcatgcatctgcatcctccaacgtcggacaaaggacccggcccactggacaccagtcgcgccacccacatcaaactgtcgggcaagaatggcctgagtgtcgagttccacagtgccttgcgggagactctaaatgcccgcgtctgggaaatcctcttgaccagcgagatcatcatcaatggcgtggccagcagtccaaccttggagcctgccaacgacaggctggcccgcattcagaagaggacaggaattgggggcatcgaacggcatttggaggcaaaagccaaggccacggatgagaacatagcacttgcctttcaggatctcagtgttctaatggccatggccaaggacatggtaggagtgtccaagacaataagcagcaagatacgcgaacagaagggagaaatatctgacgatgaaacggtgcgtttcaaatcctacctcatgagcctgggcatcgatgatcccgtcacgcgggacaactttaccagcaattctgcctacttcagtagcctggcccgacagatttgcgaaatgctgctggatcctatcgaggagcaaggtggcatgatgtccttggctgatgtctactgtcgtgtaaaccgcgctcgtggtctggaactgctatcgcctgaggacttgctgcacgcctgcgagcagcttagtggtccaatacgcctgcgcagctttcccagtggcgctagagtgctacaactggagtcccacgatgatgccctaattgccgttgacacattggagaaggtggaggctgccgagtctctggctgtggaggaactggccaagcagctgggaatttcactcctgctggccaaggagcgattgctagtggccgaacgtttgggcaaggtgtgtcgcgacgagtccgtagagggactgcggttctatccaaatcttctgctaggccgggactaa

SEQ ID NO: 42849 - protein, 399 aa, DROSOPHILA
MNRFAYVEARLSPNESFVSRDNRVKIYDGDQKTDFEDGEVVLTTHRLFWGRPGEIARAAVTLCLPLSYVISVSEETTASNFFGRKTRIIMHLHPPTSDKGPGPLDTSRATHIKLSGKNGLSVEFHSALRETLNARVWEILLTSEIIINGVASSPTLEPANDRLARIQKRTGIGGIERHLEAKAKATDENIALAFQDLSVLMAMAKDMVGVSKTISSKIREQKGEISDDETVRFKSYLMSLGIDDPVTRDNFTSNSAYFSSLARQICEMLLDPIEEQGGMMSLADVYCRVNRARGLELLSPEDLLHACEQLSGPIRLRSFPSGARVLQLESHDDALIAVDTLEKVEAAESLAVEELAKQLGISLLLAKERLLVAERLGKVCRDESVEGLRFYPNLLLGRD

SEQ ID NO: 42850 - DNA, 2391 bp, DROSOPHILA
aagtaggtttacgtcaatcctctaaaatgtaataacactttttatggatgaagtctaaagcttaaagattaaattcacgatgttgctttaaactatttacccttattgggagaagcgcaaataaaaatgaatttaaacttaatttctcctatattttactcgcaatgtatttttaataattaatacaaaaattaattttcatcacattcaaaattaggaacccatttgtaatccttgtcaaatctaaaggtaatctaaacagtatctacaaacatggagagttgccacgacagatgttagatccttggattcatccacctaaatatttgtatgctaccccgccccatcccgccctcgtcctctccccccttccaccgatcagcagtgaaatcctctgccgattgctggccctctctcgcttcttctcccttggccaaagtaccgatcccgatattcctgagccaacaacagttggtggcagcaacagaaagagcaaaggcaattgtaactgttacagggcagcgggaaaaggataacaaacgcccgccaaactttaagtgcataccaattagtagggaaacgcgtgctggaaaaccagtagtagatgggccaagaggatacgaacgcagggggttggggtatcgagatcgccaggggactcctaactgtgcgtcttgacccatacaacatggaacacaggactgcaactgccgccaactgctgccaaaggtgaaaaaccagagttggcaacacgaacaccaacaccaacaatacattgcagggctctcgagagccaccaccaaaagagtcaacaccaatacaccgagggctcgttttgattcggcttgctgccgcactcacacagtgccacaagtaaccacagtcgcacacaaaaataaaaaaaagagagctcgatttgtacctttttttcgggccaagtcgcttcaccgttggctcaatttagaactgagccatcgaccaaagattcagtcaggtgcgaagcaccgagcgatacggacgtgttcgtctccagtgagtcaagataaaaccgcactgaataagacccatcgaagatccgttcgaatccaagatcacaacgccaagaaagtgagatttgtgcagtgaacagtattgagaaaaatcacaatccaaagactgttaaagcaaatacgtaaatcagatccagtgagattccaaaaagtaaagatccagaatcaaaatgaatcacctatcgccgccgccatcgccgcactcccagcagccgagtcccgcgggattgggctgccatggagcagctctggacaagcagtggatgcagcgggcatccgccttcaacactgtgatagcctccgccgcagcacagaaactcaatggtcgaggaaaaaaaaaaataagaaaaaaggtgaggagcccggccaagagcaagggcaaaaaagatgtcttaggtcagttgtgttgcaggtgaagtcaagagcccggctcacaattaaaattcggaggggatgcgatcgaaaaggcacctgtaatacacagatagagggagacggaaggactcgaaaaaggagcaggaggagcaggatcatgaggaggagcaggggcagcagcatcggctcaacattacatcggctcatttatgtttatgtcctttcgttgtaagcagcctggcgctgattctcgattccctccagcggcattgagcacctgctgccgcttctgatgctcctgctcctcctgctgcttctcctgctgctcctactgctgctgctgctgctgctgctgttggcggaatcctggaacctgtcgcataattattgagccaggaccagacgagacgcgtgctcaaagccggtttgcggcaaaaagccatatgccaggaggcaaattacaacggcgacctgcaaccagttgacatgggccacacgacaccagcaaaatcggtagcactcagaaaaaatctcaaaatcacagttgaacaaaaattgcagaaaataaatattaagaaataatatcacattcgaatcaaatttaatgaatttaatgaatttaataaaacgatgcatattgcttactatcagatatgttttggtgaattccgataaatctagatttgttttcagtgccgaaacatatcagcagaagccaaaagatgcaacagtcgtaaaaatctctcccccagacggacagaccgcaaaaacatcggagatgggagacagagagatctgcatctaatcttggccctcaggggagtcgctgccgattgcccttttgagccacaagctgtcgcttaaaatccacaagcgaaggtgcaacaacagtcgtaagtgcgccgctgcacctgtcacgctcgatcgatattacaacgatcgacttgtcggctcgttggcatggcca

SEQ ID NO: 42851 - DNA, 2737 bp, DROSOPHILA
agcaccgagcgatacggacgtgttcgtctccagtgagtcaagataaaaccgcactgaataagacccatcgaagatccgttcgaatccaagatcacaacgccaagaaagtgagatttgtgcagtgaacagtattgagaaaaatcacaatccaaagactgttaaagcaaatacgtaaatcagatccagtgagattccaaaaagtaaagatccagaatcaaaatgaatcacctatcgccgccgccatcgccgcactcccagcagccgagtcccgcgggattgggctgccatggagcagctctggacaagcagtggatgcagcgggcatccgccttcaacactgtgatagcctccgccgcagcacagaaactcaatggtcgagatctgccctttttgtacaacccgctgctctactcgagtgccctactgtggccccaatttttgttgtcctcggccacggctctgggtacaccactgacccccatgacccccaaatcgcccgcctctgtggttttgggtcagcgggatcgtgactttgccttgacgcccgaaaaggagcatgaactccaaatgaacaataacaatgagaacagcaagcaggactatcaggagcaggatgaggatatgccactaaatctaagcaccaaggagcgcatcacatcggatgattccaaccgagatcagtatcacagcagcagcaacaacagcagcaggagcagttccagcagtgaagtggagcaactgcatccgatgacctcgctgaacgttaccccgcctcccctgagcgctgtgaatctaaagagttcgagtacaccacagcaacagcgccagagatcgcagggtaacatcatctggtcaccggcctcgatgtgcgagagatcggcgagaagggagcagtacggcctgaagatggaggagcagggcgatgaggaggagcaccaggtggatcctattgtgcgaaagttcaagtatgagcgcagaactgcatccatatcctcgctgcaatcgccgatctcctcgctgtccgctcccgcctcgaatgccgtccaggatctggagttcgaggtggcccaacagcagttgtatgcccatcgcagcgcattcatggccggattgacgggcaacaatctggagctgctcacccagcacttgaagctgaagagcgagcagccgcagcagcagcagcaacagcatcgcatcaaggacgagcagcagcaggataaccgctcggcagcggcactcatgaatttggtggcagccgccgaattcggctacatgcgtaatcaacaccaacagccgcagcagcagcagcaacaacagttgcatcaccagcagcagccgcagcaacatcagcatcagcagcaacatcctgactcgacggccacagatgttgcgcgtcgttcgtcctcctcgtcatcttaccaaggagaaaacgaagagaagcgcagcggcaggaatttccagtgcaaacagtgtggcaagagcttcaagcgttcgtccaccctgtccacacatctgctcatccacagcgatacacggccatatccctgccaatattgtggcaagcggttccaccaaaagtcggacatgaaaaagcacacgtacatacataccggcgagaagccacacaagtgcaccgtgtgcctgaaggccttcagccagagctccaacctgatcacgcatatgaggaagcacacggggtataaacccttcggttgccacctttgcgatcagtgcaaacagtgtggcaagagcttcaagcgttcgtccaccctgtccacacatctgctcatccacagcgatacacggccatatccctgccaatattgtggcaagcggttccaccaaaagtcggacatgaaaaagcacacgtacatacataccggcgagaagccacacaagtgcaccgtgtgcctgaaggccttcagccagagctccaacctgatcacgcatatgaggaagcacacggggtataaacccttcggttgccacctttgcgatcagtccttccagcgcaaggtggatctgcgacgtcatcgagagagccgccatgaggaggctccgccagtggaggacctgaagcccctgaagatggaggtgagcagcagcagctgctgaccgaggctaggcggcaatctctgatccaggagatcccagtattagctaagcaggacgagacacacactcaaaaccagatgatgatgatgatgatgatgatgatgaaggtggagcagatcacagttggccctaagtctaagtcgttgctatgaagccaaagtttgttttgtttaggccttcgcaaagatttacctaatcgtaagaattattgttaaaacatattagctaagatactgccttaagtctgtacatagttatcccaaacaagactcttttttatagccgttaaaccctagcttaatgattaatctaatttattgcataaagcgtttttgatttgattcaaacttaacccaaaattggcagctaaacgtaccaaagaacaacctcaaacaaatgaactaccacttggcgaccacttgtctaaatttagtttcctaatttatttaagtttattgatggcatcacccacatttatttatacgatctatgcgaatttttagtttattcttattttgtaataagcccaatgacttattgtaattatatttattaggagcgtatatgatttttggaaaataaagttgaaagctaaaagagaacaaacaaagaaaaaaaaaaa

SEQ ID NO: 42852 - protein, 631 aa, DROSOPHILA
MNHLSPPPSPHSQQPSPAGLGCHGAALDKQWMQRASAFNTVIASAAAQKLNGRDLPFLYNPLLYSSALLWPQFLLSSATALGTPLTPMTPKSPASVVLGQRDRDFALTPEKEHELQMNNNNENSKQDYQEQDEDMPLNLSTKERITSDDSNRDQYHSSSNNSSRSSSSSEVEQLHPMTSLNVTPPPLSAVNLKSSSTPQQQRQRSQGNIIWSPASMCERSARREQYGLKMEEQGDEEEHQVDPIVRKFKYERRTASISSLQSPISSLSAPASNAVQDLEFEVAQQQLYAHRSAFMAGLTGNNLELLTQHLKLKSEQPQQQQQQHRIKDEQQQDNRSAAALMNLVAAAEFGYMRNQHQQPQQQQQQQLHHQQQPQQHQHQQQHPDSTATDVARRSSSSSSYQGENEEKRSGRNFQCKQCGKSFKRSSTLSTHLLIHSDTRPYPCQYCGKRFHQKSDMKKHTYIHTGEKPHKCTVCLKAFSQSSNLITHMRKHTGYKPFGCHLCDQCKQCGKSFKRSSTLSTHLLIHSDTRPYPCQYCGKRFHQKSDMKKHTYIHTGEKPHKCTVCLKAFSQSSNLITHMRKHTGYKPFGCHLCDQSFQRKVDLRRHRESRHEEAPPVEDLKPLKMEVSSSSC

SEQ ID NO: 42853 - DNA, 15933 bp, DROSOPHILA
tatagttgtgtccgtggccgtggaaattgttgcacttgccgaagacttccagattctcggcgtcgctcaattggggactgaagagaaaatagatgcagcaatcaatttaaatcgaactgaattggtttgccagccgtgattgaatcaggcaattgaatgattcaatttgattcaatctaattacctatggagacgatggcaggcgctgaaagtttcgcgacgggttaaaaaggcaacaggttgctgcgacatttcaagtccgatttatactatatatctggatctgtatctggatgtggatttatatatgcggctgatcagctgcgcgctttggcaatgttttacaatgaatgcaaaacctgcttttgagccgcgcttatttatatggtacttggatcgagggaacaaggaaatataagccacaaatgcggcgactgcgatatcaacacgctcggaactagtttctctgaacttttcgagtgcggctaattgcagctgattagcgattgatgttccctcgttttctgttgcaagtgcctatgcgtgctgcaaagacagggtgtggtatgctatagccatggtaacaaactcaattcagcaaggaactcacctttaattgctatggattttcaataatatttacttttgtctacgttgctcgtcaacagctgctcccgataacaaggcagcgcgtatcggttatcggccagagctgagcagtttgccgccacaactgttctcagtgatttacaactgcacaaatagactattgtatgggtagaaatccttacactattacaatttcgctatatatttatttatttcatgttagttctttgtcaattatctcataatttaaatgagctgattaacagagttagctaacagagtatgtaagtgctgttcatccctggctcgtggtggcgttgccggacctcacgccgctcactgtaatcaaccctgctttgctatcgatcgccgcccttcactagaaaaaaaataacaaacgacgccgcgcaataattcgaaactcttcggcgttatttaaaaaacgagcagagatacctaaataataatctagacatgagcaacaagagcactccggtgcggcagcgcatccagcagttccagacgcgaggagtccacaaatccacgccggcatccgagatgcgcaagaaggtgctgatgacgcgggcggaggatcgggagcaccgggatcgtcccgaacagctgctgaacactgcattcagcgggagcacgccacagccgaagcccaagcccacggccctgaatgcctgctacacaccctcgtcgctgtacaggaatgcgaactctactcctggaagagcaaagacgcccggcaccgggaaatccagctgcagcaggacaaaggagcgggactctctgatggagtcctgcctcagcgtgtccgaggagagcaacatgattgtggcggtgcgagtgcggccactgaatgccctggaatgcacacgtggtcaggtcaccaatgtggtccaggtgcacggaaacagcaacgagctgactgtccaagcgggcagcagtgctgatgcctccgccggcgtgacgcacttcttcagctacgaccaggtctactactcgtgcgatcccgaacgaaagaacttcgcctgccaggccaaagtctttgagggcacagcgcgtcccttgatcgacactgccttcgagggctacaatgcctgcttgtttgcctacggccagacgggctcgggcaaatcgtacagcatgatgggcattgaagcattggatgacgccgctctggatggcggaccgccgcacgatgaggcgggcatcattccacgcttctgccacgagctattccgccgcatagaggctgtgaaaagtcagcagcagctgcaggtggaggtggaggtcagctactttgagatctacaacgagaagatacacgatctgctgagtgtccagcatgcggcagctgccaccggggaatccacgcccatccagcagcaacaacagcagcagcgtccggctctaaaggtcagggagcatcccatcttcgggccctacgtagtggacttgagtgcccactcggtggactcgtactcggcactccgcaactggcttgccgtgggcaactcccagcgggccactgcctccacggccatgaacgacaagagctcgcgctcacactccatcttcaacattgtcctaaacctcaccgatctgagcagtgacgatggcctgtcctcggatacggactcgagcacggcctcctccctgcggcagacgcggcgcagcaagattagcctggtggacctggcgggcagcgaacgcattagcgtctccggatcgaacggcgagcggatccgcgagggcgtcagcatcaacaagagcctgctgacgctggggaaagtaattgctgctctcgccgattcccgcaaggcgatcgccaatggacccctgggctctgggacgcccagcaccttcgttccctatcgcgagagcgtgctcacctggctgttgcgggtaagtgttacgaaatagttcttagctgcgtttgtacttatcaaccgggtcagtaggttggtctactttcggctaatgataactctttcttatccccttggtttttgaaatcaataattgtacccagaagtgattgctaagtatgtgtttcgaataagttcagctcagtaaaaccttataacctcatgtcttcaatataaatgcatatgtatattcgcaatgctttccgcacttttgccaccaccgataggattgcttatcaacactttcgcttcgattaggcagtggcccacggaatggggtccccttgcaatcagtaattacccggaaagcaatcagtacgtagaactgcactgcaacatgcaaatgacacgttgacccctgcggaaagtacccacaaaatgttcgtacggtcaaatgtttacttaactggctggcagatattcgtcttttcaacagatctcgtgatgagctatgaagcccactgtctacagagatatcatctcgactcgcgcgacacgcgaattctgttttaatgatgtctgcactgcgaggagcagctgctagacagatttatgttggctctatcaattaactggggtgctaattactttaattaaaataaagcgtcaaattgtccgaaaaaaacaaggaaaagaagacgacaacatcagccagagattagattgagtttatctgcgctttataggactaaatatgagagatctcgagttctaaactcgaaccttgttatcattcgtttgtttattttgtttgctaagattgccagcagacttagtgtattttttattattattatttccttatcattttcgataggaaagccttttattaaggtctaccaaatcaaagacctcccgcacctcaatcaattgagtgattaaaattttggcctcttatcatatctatttaatctattgttgttgcttttcctatgtgaccataaaatttatgacctgatacaaaggcgcacgtgtaaactttctagaaatttattttaagaacgcgaataaaaagatagcagtgtcttcacccgggtaatataattattttgttataaaacctcagcaaatgcttacatagcattagcaggaaaattgttataaacttgtcatgagacttgaatgttgtgcattagttaacatattagctacttgtttcacgattgtttgaattgagtaacgactgcgttttctttagcaatcaatgtaacatacttatgtgtgcattttaagttaacaactgctcttaagcgaacgccacacgttcgtaataacttgattgttggaatattaccaggctagttaatccgaaagtgagggttttatataatacaagtatctggcttctaaaaaaaggcgcactcgacatttgcgacgtaatttataatcattcgactgcattcaatgagtaattacatggcgcccacaagtgagaggctcttgatcgaaagtccaaacacttgtcttttttcccgaaacccgttccactgagtgttatttagtgtccagtgtccactttgcttttcgttacggtagtacggcccataaaatggctcacatgatttatttccgtacgcggcctttgccataaaaggtgaagacaaatatttcttggaatggcgtcgtaggtccgtaggggactctcgcagccagcgtagtgacgaaacgcaccagattgtggttgcccaatccatctttaaaatcattgaaagatttagatggtttagatttagggtttgtatgttgattgttactagttgttttcacccctttaaaaggaggggggttttgttgtgttttttttttatatatcagccgaccttgttttttgcctctgatatttttgggcttccatggttcctatctatccgtgaagtacttttcctatctttgcatacgacacaaaagttccatctacatcttcacttgccaccccatagatttaaaaatactttgcagataatgctttatttggtatttttgtgcggtacttcggcactaaaacattataacacttgatacgttatcgcgtctcctaagttgcgacaccaacaatttcaattgttgctgtcgttgttgacgttttccacatttacacgctgaaggctcgcatttgcaattgcccttgctcagcttttttccatccttaagagctgcaataacaatttgtacacaaaatgaataatttatatacagatagttaggatggtaactaaacgtttacgaagtgtatacaagccaataaaggtaattgatggcagagtatgttacaattagcaaatatgtttaggccaagtaaaatctaaagttaaccaggatttgggtacaatgtaagtaatgggagatgctttataatcaaaattggttggtgttttataactttaatttttaacattagttgtgatttgacatttgcagtccgttttgtttattagcacagactcgtcaatttaaagtcatatttaagttcattatccaaaaagctcattattcgaaacaaaaaaagaatactgttaatactgttatttaactggcttaataacagtccacttatatgaaaatggttttgcactacggctaggttttgtaaaagaataattcaatttttgataggtaattagaatagttgacatattttgatgtaagtatttcactttaaataccatggcctagctattaagttcaccttgcgacttgactcctctggaacttttcagtttttgtaacaagcggttcagcattttttgaaatgcaaagggatatattctgttctccaagaaataagtccttttttattcattaaactatagttttttctcaatttttattagttttgagaactcgttgcgaccttcacatgactgggggaactttggaactggaaatgcggagtcccaagccagctttctaaataaattccaaattaacttgctcgtgtgcaaagccctagaaaccgcactgagttcacaatcagcattttccgagttggatttggaaagccacaaacaccgtttagatagccagggaatgtgggattttgaatgaaatccagaaacatcgaattgaatgcaaatgacgtaggttcacacgatttcaaattcgattgatctgctgtttctaatacgtgtctaatacgaaaagcgtgccactgaggatacgtcagttaattattttcgtaattagcaacaggcgagttgtctgtcgccgttatgaattttcaaataagccacgttttcagttcacaaatgaatgctaattatgtgaactgaaaaaatttgacatacgagtagtaaccagattaattattcacaagatttcgactaactgagccattcaataatgtaaatagtagtagttataaatagtatagtatagtatagtagttataaattcaaaagtttgtatctctgacccacgttggcataacaaaatgcttcgaacgtgtgctctccgttccagtttcccgcataacaacaattgtaatttaagccacactgtttaataatatatttagccccaaccaagtggttagcattggaatataaaatgagtcgaattcgatgcacaaacaactgaatatgtatatggcttcctccccgcgagttgtttctctcgaacatcgctttccccgtcgccccattgcacatatacccttttgcacactcatgaaaaaatatgcaaatggaatgaatggttttcgtgtggggggatgcgctcagttctcagtttgatcagttgaatttttttgattcgcctttcatgattaaggcacggatgatctcatctacccgtgccaaacgttcgttgctctaattcaattcggcttagttgactggggtttcatttggatcacttgggagctggcatccctggacattcgcttgcaaggtgggatagtgcatggtcaagttccaggtcggtttattggggctcgaggtgctttcgcttagttcccagtttagtgcctaaaacctgaccttagccatcaagtacttacttatcatatttaacgttttcaagcggcggaacattttgagttcagacagacaaaagacagattaacttcaattagtaaactggtgcgagacggaaagatttccgtaaagatttgcataagaaattaagacttttatttggaaaatttaagtccaaactgacccacctcaacgtatgtaattggaacaggtgtctaacttttagaaatcgtagcaactatgaatgatatctcctttcttttaatcgtaatttcctcaagtaaccctcaagatacaagtacgcattttaacttaaatttttcaatcatttgtcgttttattcggtttacatataatttaaactaaccattaatatataatatatatgatatataacattgtataaattgaaaattttcttggaacctgcaagcaaattttacacaaatcattacattttgatcaattacttaaatgactaatgcaattgttaaatcgtttttataatatttccgtccgtctttttgcacagctgagtctgaacaccaaaaattaataacaatttctgttctgtaacgacaagttgagttaacaaaatgtaaccaggcataaacttttgaacaatttcaacttttacatacatatttcgatttgatttcattttgacacttgctcggactgtgcaacgctcagttggtattacaataaatataggggaatgtctaatatagacaaggatacaataaaaatcggggtccaaagtatgtactacgcatatatcgagaaaataacagttgcaaaaccttgattgatcgttatagttttcattatttctttcttatatggtaatacctgtaactgatccaattgggtccaaactaaagcaacgaaaataacaaaaatttcgcttaaaaattttctactgcaatttactcagtctcgtatgcaaaatagaaaattcagtttttgcttcccttgtgttacatatataattttttttttttttttttgcctaaggtcaaaaaatgcgttggtcaagcggggcaggttttcgttacttgattttttcgtcgtgcgctattgtttgtcggtaaacaaagtgccgtttgtagttgtacataactgcgaagttggtgtaaaaacgaagggctagataatgaaaaaggtagttgtaaattggtatcaagtggttctggcttttgtaaatggtagtgtattcgcaacgcggaaatgctgggcaaccattttaaaaaaaataggggtacagttgccttagattattgtagctgcaggctgctgtctcgctctctcgcgcaatcttcgtcttcgacagctttttctcttttctcctcgggttttctttgtttttgtttttgttcttactctttcaggtttcctttcttctgggttaggttacacatctgtatacatatatggcatttcgcgaatgctgcgggcaccgtccgcagtagattcgtctcgctcccactcacaccttgcagctttgcggggcggcaaggacggtcgactggctgtgattgtgggtgtgctccagctcatgctcgtgctcgtgcatgtcctcctcgtcctcgcagatgctgtcatggtgcttcctttgctcccgcttgcgcatgtagttgatgagcggccgcttcttgtgctccttgcagaatgggcagtccttgcgcatctgcttctcggactttatctgcttgcacttttctgcaatgggagcaatgtgataggtcaccggttagtgaaggtcggcactgaatgttcaccctcgtctgttgtttcccgcattcgcttccactctgccttttagcctacgtgcccttctgggccgtcgaacagctgatttgactacgtgacgtcgctgcgtctacgttcacgacgtcacgtcgccaccgatggcgcccctccccacgctcgcacaatttttcccgctactcgacgtgtgaccctgtgacggaggcagctatatatttaatattatcatgcactggattttagaaacctattttaaaaagttgaatctatctaatctttggttttaatgaaaacattgttgtctttcgacgactgtaacacaactactacattgagcacaactgtacttacagcttgtgtgcttttgtgacctgcctccgttaattaaaccattgctttgattgctcaattgaccgtgttaaaagctaaacggttattattgattaaagcccagccgatccatgaggaaagtctatttatagccgccgataagcgaccttgcataatctctaaatgtgttccacactgggggaaaaaagtgctttataaactggatatttacacacatatgcatgctaccattcaaatacgaattgagttgtgtatgtacagacatgtgaatctaaagtttaaagtaagctagatatttgccttgcataatttttcacttgttttttttttatttctctgcaacccgataatgcactacgcgtatatgtatactatatggacgaaaacagcacgaaggtttaacatttacacacctcagtttcgttattgcgcttcagttttggcactcaaacacaatgaaaccctgctttgtttgttcttccctataaaagaatccattgtgcgaccacctgcttaacttttgagagccgattctggaggtacagccaagtcttagtgcttgcttagttgtctgtgtaattaataatcgtaaagtattcgagtgcagagtgtgtcttaatggacttgagtagtgacctcgataagagcgggtttaaccacctctgaaattgccacaaaaagtatatctttgccttttatgattttccacgagtgacaaagtaacgatatactctttttgtatgcccatctgaattgcgctttaactttggaatgccggaaattcgtaaggaaccttgtgggcttttagccgctttgtgtgtgcaattaagcgcgaatatctttagcacgtggattcaagccgtaaataaaaacaaaatcgagggggtgtggaacctacttgataaggtgacttgcgccgcgaaactttggacaccctgtgcttgtgcgcaaaaattaaggcgtgttctacacacacacacacgcacacacacacttatgcacatggggctaagaaatcaggctggctatttataaatggttgcaaaaacaacaaaacaacacacgcaatacacaaaaacaagtgagaaacgcgtctgctttcaatctcgccccttttttgccagtgcattctgagcgctatctgttttttcgccaaaaattaccttgcactcgactgtagcagtccttgaccgcgtgtgaggaagtggtggactccagggtaccataggggaactcctcgtagtcgcggtagtagccgctgcgcatggacccgccatatgccattgtggtgtcgctgacgcagaatccccaaacatccatgtctgtgctgtgcggtgtttcgttactatttttgcgaactgcagtgccaatcaacgggatgtgaattgtgtttgtaatgtgggtgtgtgtttttctttctttctctctttttgcgcgcgttgtgcgaggtcgtttcactttgtctctcgattggctcgggcgtccaatgaacctggcttttaaaatcactttgttttgtttttttaacaacgctttttggtgcacttttgcgtggaggtgactcgcagaggttttccttctttcttcttcttgagctgcaaatctctcgccgaaattcgatgtattctgttggaggtctctcgtgaaactgaaagccgaacactagaattactgcatttttgtagctctcgtgcgctggcgatacttcggctcttgttttgctgcccacttcgggtctcccctatatttacttctcatgtgcctacgtgtgaatgtgtgtggacagtcgcgggaaaacgtttagggcacgtgtatatgaatgaatggactttaatttgttttaaatattctttaatgtctgtagtacttggaataggtgtatatactatgctgcccgcacttgtactaaaatatttgtgtgcctggttgtaaacacgtatgtgtggcattgtgttttgttgtgttttcgcgtctcgtgcttttgtcagagtttcaccttccacccgacccctcccctttcgagtgccacacacctctcgcttggggcacattggttcgctactctcgaaatcacctctgccgtggaagcaagcattttccaagtgattcaccctgtgttagtttgaaaatttttaataaatattaattagccggggcatgaggaatactcttggaagtttttcttattagcggcgaatcgctaatgccgcggagatgacgaaaaagtaatcatgagagtgatcggacggatgttcgacggctgatcatctggaggatgggatggacatttgtgtttttataagctgcgctaatcacggtctagactgcaggccgaccatgccgtgatttagccttatttctgaaaccaaatttggttgccaagcggattgaacacttttgagagcccaaattggagtgttctttttttttataaactttccatggtcaaaatggactgtatttccagcgtgtggcattctaggcgtgtaaaccaccagctgcactttttcactactttgcctagaggtttttgaacatttgaaaaatttgtttaaatctagtgttaattggcagtctacgtcattttagccggttccgatcaaggttttgctgttttggctcaaaaagcataccgcctatattagcgccttcctgcggtttatgttttggtgcacgctcatttcagttacttttgaggagatcgtgactgatttctaaaggtgggaggacgtagagggctatatttaggaaaaaagattttttttaatgtggtacgctttggtacgtgaatgactaacagagagtgtcgccattaattgtattaatttgcggttaacggaccacggacccagattctgaccagacgacactgacgggcccctaaggtcacctatggtagctgtttttcaaggcatatttctgcacttgcgaccactgtgcacgcctacgccgctgctgctgcgcagtttgtgtaatcaaccatcctcttttcggtgcccgctcttgtttggcccacggtgctgacctgcttaatcaaacaagtgtcacttacgcacactgccaagaatgtgtgctaactagctaatacgaagctttatttgaatacatacatatatacatacgtatgcatacactacactacaaaaaaaaaaaaactatcagataaaaatgcaacggatggccaatgcatttgtaattaggtaaacaaatatcttactaaacgaatatgtaaccaacattttgaaagcactgcgatgcaccaattagtgagttttatttctgagcctatttcttccgtgtacttgcatgtggatgcattttgtttgcacaacaacttttcgattcccgcacagcggttgctgataacgaccatcagtaggtgcctttgtcacggtagctttacgcaaacagttgggcgttgtcttatcatttcgtccctccttatcgcaccgagtccacaatcgaagcacacactcgaaggtttagattgtcaattttccattccttgaaattttcacacatctgttctgagtgctttcgagtgcattatagtgttcaccgatgatcgataatcatcgtacctcttgcatagtggggtatattcctttttgccacatatgtatgcatatagggttggtgtgaaaaaccactttccttatcaacttgggtgcccatccagttctttaattgattggaaaatatgtttattgggatttctgttttattttcttcagtccattaaatcattattatcacattgagattaaatggaccatttccaataacaattccatacaggaaccattaggattatatatatcggtttatgttgttccttaaaagatattcagccgactctataagctactaaaagtagtgcattcaaaatgcctgatttattcatcaatgaaatgttgtttcggttttacgtgctagattaaaataaaataaaatgcatataaaaattatatttaggtttatactactgttactgattcacatgcccttgtttgtgatttatttcattttaaaaggtgttaaaaaatattgttatgaatgtgagaaagccaagctacacgttgtataccacagccatttgccatattgaccctgccaataataaataacttgatttaccccagatattaacatcaaaacaatacaattactcacccaatccaaagatgcatcacagagcttttaatataactgacgttgttccttcattccaggaaaacctcggcgggaactcgaagacggtcatgttggccaccatttcaccggccagcatccatgcggatgagaccctagccactttgcgttacgcctgcaaggcgcgttccatcgtcaaccgggtgaaggtaaacgaatccccccacgacaagatcatacgggatctgcgcgccgaggtggatcgcctgaagtcgctgaggaacgagtacgagcgccagcggcgcttgtccggcaatagtaacaatcccgtgccacgtaagatcatcattgaaacctccgtggacgagaccgaggtggaggcactgcgtcagcagctggcagaacgggaaagggagctgagtcgagcgcaaaagtcatggatggagaagctcaaggaggcggaggatcagcgcaaatcggaacttcgtgtcctgaaacgccggggattggctctggaactaactgctgagcagaagcaggcctgtctggttaatttaacagcggatcccatactaagtggcaccctgttctatctgttgccccaaggactagtgcggataggacgaggtcgtctgccaggagggagttctagttcgcagcctgatattgtactggatggtccactggtggccttgcagcactgcagcatcgagcatgaacgtggtggcaagttgtatgtcatccccggcagcgaggacttcgagacctacgtgaacggagaactactgaaggatcgtcgccagctgtttcatggcgaccgtctcgtcataggtggctcccactactttcgcatttccaatcccttctgctcgcaaagaggcaaggccgatcatccggtagatttccagctggcccatcaggagattttgcaaaagcaggagcagcaacttcgctccgaattggaggcggaaaagcgagccgctctcacgaagattgaacaggagcgggcgcagcatgcccgggactttgaggagcgtctgcagtgcctcgaactagagcagttcaagtacaaatgcaacagcgagatgctggagacggaacgccaggccttggccttggcccaacaacaggaacacactccgctaaggcatgaagatgcagtatcaactccagcacagaagtcgactatactggaggacattcaacgcatcatgctgaatccctcggaggagagtcttcacaagacccagttgatggtcaaagaggccacccagcgttgtcgccagttggacctgccattggagttccggcaaactcagacgccagatgaatttggtctcctgcgcactgttatcttgattctggataagcagcggggattgaaggccgagtggcccacagctagactgggtgtgtggttggatttggtcagggataatgctgaacagcaggaaaagctgaacgctacaaccattttccagagtgttgaggtggattgggagccactggacgcggatctcaatgagacactgagtgacacacacaactccagtcgcattgcccttaatctgagtgccatgaaggatgttctgttgaataaaccgctgaaacgcctgctcaacgcatccagcagcaagagcaatacaccgcgacagacatccactccctcacctggaagccagctggtgcacttcaccaaacgcctgctgacctacgatccggaggagatacctgaaagccagagtagtttcacaacgctcgtccagcaggagctgcaaatcatgcagcgatccgcccagcgtttacggcgacactgcgaggctgccctactcgagcgtgaaaaccatcaggacaacggcgtcctggccgtcagcctgcaggaggctctggcacgaatggacaccgtgctgaacgggatgcacacttcgttggcgagagcggaggccactgcatgtgtcacctcgccgacgaaaacacagaaggctgtgcgctttcttatcgattgacggagattagttcgcaccttggactagattttaatgctgcaatgtgctttgtgttgtttttatgtttttaaatatatattttttgtatattgatttttaacaataaaatgtattgatagcaccttcaagtgaaactggcttttgggaaatattttaaagtggcggtacaaaaaaagacttttcaattagtttatcaaataaatcactagctttagtttgtttttgtaatgattttctggtcttacataacttaatatccaaatcatgcttgtacgtaagtgacataatagtttgctctggcattaaaataattatttacttcattatcacctcttcgaaagtttatcacggttttcgaacaactttgtgtcaacatccaaatattggtttataaaaatattaaaagtaccgcaggctaataaccatgtgttccctctgcctttcttgtggaaatcttcaaccttgggcctcctcctcttccacgccttcagtggactccagctccttatcgccagccaattgctcaagtagttttgtgttcagatcaactacccaatcgcagaactgtccgccctttaggcttacgaagtcggccaggaacacgtttacccttggctcgtcctttggctcgaagggacctggaatctgttcctgaatccaaggctgcagcttcttgtccacccgtttggctgtgctcttcagggtgaagaagagccggaaggcgatatagcgaccagtgggcgtgataaggcactgggagacataaccctgttggggctgtcgcgagagtagggaatcctccagaaaggactgcagcttcttgacactcgctttattgggccacggtgtgggccacgcataactgggccagaatctcagcggcagtggaatgggacatcgcctgtagatgatcaccacgctgcgctgcatttccaagcatctattcagagtacaatccttgagtgaaccatccactgtggagtacagacgatgggcgaagaactggatcagatccttgtgcagcttctggtgatgagccactgtcatggcgtaaaagtgctgcagatccaggattaccacctcctctggatgggtgtccacgaactggcgaatctccagaagtggctcaaaaat

SEQ ID NO: 42854 - DNA, 3583 bp, DROSOPHILA
taacaaacgacgccgcgcaataattcgaaactcttcggcgttatttaaaaaacgagcagagatacctaaataataatctagacatgagcaacaagagcactccggtgcggcagcgcatccagcagttccagacgcgaggagtccacaaatccacgccggcatccgagatgcgcaagaaggtgctgatgacgcgggcggaggatcgggagcaccgggatcgtcccgaacagctgctgaacactgcattcagcgggagcacgccacagccgaagcccaagcccacggccctgaatgcctgctacacaccctcgtcgctgtacaggaatgcgaactctactcctggaagagcaaagacgcccggcaccgggaaatccagctgcagcaggacaaaggagcgggactctctgatggagtcctgcctcagcgtgtccgaggagagcaacatgattgtggcggtgcgagtgcggccactgaatgccctggaatgcacacgtggtcaggtcaccaatgtggtccaggtgcacggaaacagcaacgagctgactgtccaagcgggcagcagtgctgatgcctccgccggcgtgacgcacttcttcagctacgaccaggtctactactcgtgcgatcccgaacgaaagaacttcgcctgccaggccaaagtctttgagggcacagcgcgtcccttgatcgacactgccttcgagggctacaatgcctgcttgtttgcctacggccagacgggctcgggcaaatcgtacagcatgatgggcattgaagcattggatgacgccgctctggatggcggaccgccgcacgatgaggcgggcatcattccacgcttctgccacgagctattccgccgcatagaggctgtgaaaagtcagcagcagctgcaggtggaggtggaggtcagctactttgagatctacaacgagaagatacacgatctgctgagtgtccagcatgcggcagctgccaccggggaatccacgcccatccagcagcaacaacagcagcagcgtccggctctaaaggtcagggagcatcccatcttcgggccctacgtagtggacttgagtgcccactcggtggactcgtactcggcactccgcaactggcttgccgtgggcaactcccagcgggccactgcctccacggccatgaacgacaagagctcgcgctcacactccatcttcaacattgtcctaaacctcaccgatctgagcagtgacgatggcctgtcctcggatacggactcgagcacggcctcctccctgcggcagacgcggcgcagcaagattagcctggtggacctggcgggcagcgaacgcattagcgtctccggatcgaacggcgagcggatccgcgagggcgtcagcatcaacaagagcctgctgacgctggggaaagtaattgctgctctcgccgattcccgcaaggcgatcgccaatggacccctgggctctgggacgcccagcaccttcgttccctatcgcgagagcgtgctcacctggctgttgcgggaaaacctcggcgggaactcgaagacggtcatgttggccaccatttcaccggccagcatccatgcggatgagaccctagccactttgcgttacgcctgcaaggcgcgttccatcgtcaaccgggtgaaggtaaacgaatccccccacgacaagatcatacgggatctgcgcgccgaggtggatcgcctgaagtcgctgaggaacgagtacgagcgccagcggcgcttgtccggcaatagtaacaatcccgtgccacgtaagatcatcattgaaacctccgtggacgagaccgaggtggaggcactgcgtcagcagctggcagaacgggaaagggagctgagtcgagcgcaaaagtcatggatggagaagctcaaggaggcggaggatcagcgcaaatcggaacttcgtgtcctgaaacgccggggattggctctggaactaactgctgagcagaagcaggcctgtctggttaatttaacagcggatcccatactaagtggcaccctgttctatctgttgccccaaggactagtgcggataggacgaggtcgtctgccaggagggagttctagttcgcagcctgatattgtactggatggtccactggtggccttgcagcactgcagcatcgagcatgaacgtggtggcaagttgtatgtcatccccggcagcgaggacttcgagacctacgtgaacggagaactactgaaggatcgtcgccagctgtttcatggcgaccgtctcgtcataggtggctcccactactttcgcatttccaatcccttctgctcgcaaagaggcaaggccgatcatccggtagatttccagctggcccatcaggagattttgcaaaagcaggagcagcaacttcgctccgaattggaggcggaaaagcgagccgctctcacgaagattgaacaggagcgggcgcagcatgcccgggactttgaggagcgtctgcagtgcctcgaactagagcagttcaagtacaaatgcaacagcgagatgctggagacggaacgccaggccttggccttggcccaacaacaggaacacactccgctaaggcatgaagatgcagtatcaactccagcacagaagtcgactatactggaggacattcaacgcatcatgctgaatccctcggaggagagtcttcacaagacccagttgatggtcaaagaggccacccagcgttgtcgccagttggacctgccattggagttccggcaaactcagacgccagatgaatttggtctcctgcgcactgttatcttgattctggataagcagcggggattgaaggccgagtggcccacagctagactgggtgtgtggttggatttggtcagggataatgctgaacagcaggaaaagctgaacgctacaaccattttccagagtgttgaggtggattgggagccactggacgcggatctcaatgagacactgagtgacacacacaactccagtcgcattgcccttaatctgagtgccatgaaggatgttctgttgaataaaccgctgaaacgcctgctcaacgcatccagcagcaagagcaatacaccgcgacagacatccactccctcacctggaagccagctggtgcacttcaccaaacgcctgctgacctacgatccggaggagatacctgaaagccagagtagtttcacaacgctcgtccagcaggagctgcaaatcatgcagcgatccgcccagcgtttacggcgacactgcgaggctgccctactcgagcgtgaaaaccatcaggacaacggcgtcctggccgtcagcctgcaggaggctctggcacgaatggacaccgtgctgaacgggatgcacacttcgttggcgagagcggaggccactgcatgtgtcacctcgccgacgaaaacacagaaggctgtgcgctttcttatcgattgacggagattagttcgcaccttggactagattttaatgctgcaatgtgctttgtgttgtttttatgtttttaaatatatattttttgtatattgatttttaacaataaaatgtattgatagcaccttcaagtgaaa

SEQ ID NO: 42855 - protein, 1121 aa, DROSOPHILA
MSNKSTPVRQRIQQFQTRGVHKSTPASEMRKKVLMTRAEDREHRDRPEQLLNTAFSGSTPQPKPKPTALNACYTPSSLYRNANSTPGRAKTPGTGKSSCSRTKERDSLMESCLSVSEESNMIVAVRVRPLNALECTRGQVTNVVQVHGNSNELTVQAGSSADASAGVTHFFSYDQVYYSCDPERKNFACQAKVFEGTARPLIDTAFEGYNACLFAYGQTGSGKSYSMMGIEALDDAALDGGPPHDEAGIIPRFCHELFRRIEAVKSQQQLQVEVEVSYFEIYNEKIHDLLSVQHAAAATGESTPIQQQQQQQRPALKVREHPIFGPYVVDLSAHSVDSYSALRNWLAVGNSQRATASTAMNDKSSRSHSIFNIVLNLTDLSSDDGLSSDTDSSTASSLRQTRRSKISLVDLAGSERISVSGSNGERIREGVSINKSLLTLGKVIAALADSRKAIANGPLGSGTPSTFVPYRESVLTWLLRENLGGNSKTVMLATISPASIHADETLATLRYACKARSIVNRVKVNESPHDKIIRDLRAEVDRLKSLRNEYERQRRLSGNSNNPVPRKIIIETSVDETEVEALRQQLAERERELSRAQKSWMEKLKEAEDQRKSELRVLKRRGLALELTAEQKQACLVNLTADPILSGTLFYLLPQGLVRIGRGRLPGGSSSSQPDIVLDGPLVALQHCSIEHERGGKLYVIPGSEDFETYVNGELLKDRRQLFHGDRLVIGGSHYFRISNPFCSQRGKADHPVDFQLAHQEILQKQEQQLRSELEAEKRAALTKIEQERAQHARDFEERLQCLELEQFKYKCNSEMLETERQALALAQQQEHTPLRHEDAVSTPAQKSTILEDIQRIMLNPSEESLHKTQLMVKEATQRCRQLDLPLEFRQTQTPDEFGLLRTVILILDKQRGLKAEWPTARLGVWLDLVRDNAEQQEKLNATTIFQSVEVDWEPLDADLNETLSDTHNSSRIALNLSAMKDVLLNKPLKRLLNASSSKSNTPRQTSTPSPGSQLVHFTKRLLTYDPEEIPESQSSFTTLVQQELQIMQRSAQRLRRHCEAALLERENHQDNGVLAVSLQEALARMDTVLNGMHTSLARAEATACVTSPTKTQKAVRFLID

SEQ ID NO: 42856 - DNA, 3209 bp, DROSOPHILA
ctgggggttgggtcactccttcggttacctcgacaggagcagcttgaatggtgagaacaactaggagaggaaaactaaataccacaagctacaacttttagaatattctcacctgcactcagcagaatcagtagctgaatcttccagactggaactccgacactagtggctcccattgcagttggtcaacttctgtgacaagtgacacaaatcccgctgcttttataggcaacccagccgcaacctgttgcattgtccatcccacgcccaattagtttttaggtttagtgcctggcaatggatgatggccctttcaagcttcagatatcaatcagtttatagaacttgttttgggggtcaatgcacttgattcaatgcaactgcatcgccttagaattcttctcaatttaattacaaagaggtgaatttgcctctaagaaagttttgaaaattatctgattgaaagatatatatgtaaagttgaagttgttatacccgttactttaacacacaaagttctttagaggccataaagaattatcaagaatgagttcgttaagaatcataggtgtattcattcccattacaaattttgcacacacctttccccttgctactaaatctgcttcgagttatactagtttgtcacagaaatgttggatcccgattaatgtctttccaaagatatagctatgtaaatgtacaatgcacctatttcagtaattaaatgctcaagggatctgaaaaatagtgtaactggtctggagtcataagaactaagaagacactcttactgactttgggaaaataaaagtgcgtttcgatcccatataaaatatctacataaaagtgctaagcagatcttatgatttttatttttatgacaatataaaagtcgggttaccattaaagttagccataaaaattgtagtccaatacacgtttaaactacaaagcgtgtatttaaaaaaaacccattttgtttatcaaatatagatgattatcgttgtttagaattttatttgttgtaataaattaaataaatactataattaggtgagatttgtgtagccattgctttctaagctacttggtacttgagcctatcaatgtccttgcccttgggttgggtctgctggtgaaggggcgcgatctccagaggtttgggcgtgggagtgtccttcagtggcataggcggcatagcgatgtcctcggtcgtctttgcaggctccaaaactgaaactggttttggaactgctacttgaataggaactggcactggcttctgggtggattccactttcttctgtggcattagggaaaggggatccttctgcttgttttccttttggtcatccttctcctcgctgctttcgctgctgtccttctcgttcttatttttctcagccttctccttcttcttttgctccttctccagcttgtgttgttcctcctcctgcttacgcttctcctcctccagcttcaattgctccacgatggccgcatcccggaaataaggcgatgaccggaacttcttgtcggcataggcagtttcctgcggatatttcgcctggcactcggcataggcgaagtccgtccaaagaccgtgggatcggcacttggctacacccaacttgcacttgttgtagaaaacggccacctctgaggtggtcctgccgcagatgggctcgtacagttcatcgcaatcatcgtcgcacagatagccctcgctcaaggactgcgcggcactgttgatagccgcggaattggaagactggcaattcttctggcccgactcacagctgaaccaggcgatgggaatggccaaataggggggacttagacgcttctgtgcggctccaatctcaccgggagccgcaaaggtgcgctttacatagtagccgtgctcttcggtggaaattggagtgtttccagccaaatccgtggagctagaccacttggtctttgtcttggtcttgtggggatcagacttttcatagtgatgatcggagcccttgtgcttgcgccgctttgcatccgcgggaatcgcctccaaaagcagcagagctgctactgctaaaaaggaaatgggcgcataccagttaattatgggacttccagaactggtcagcttcgatatgcgagacttacctacgatgcaaactacttggtatggcctcatgttgatctggtcagctgctcgactccacaacaactgatcgcatcttctggcgagcggtgcttaagtaccagtcttagccactcggcggggaattctttaggggcttaccggttttcttcccactgcagctctttcaaagagttccacatcttctcgagatttgtttacacttcgcgatgtctcgaggtccgaacgaaagtacgccaactttttggtactcatactatattatatttggtgaaattttatgcaaactgatgtggctgtggtcgtacccttcccagcgatagccatctagaatgtctcggatctggaactggttgtgtgtgtgtgtgtttttttaacaccttcgatgccctccattcgacgcccagcctcccaagctcggccgcttctcgagccggttctctgaaattgggtcaatctggaaaggttcggtgatctggttgttattttatgaggttcttctgaccgcgatcgccggcagctgcactcgctcgcaggaaatccacgtccaatcaagcgttgtcattctgttattccgccgatctctgttgatctttgatctgcgcaattgatcacctccatggatggcgattgtgatcttaattagatcgggctcaactgaaatgtgcctcagtgatctgtttcgctgaccgtcagactgacatatgaaaagtatatattagtttgcagcatacatacattctctcgtgtacttatgatcaccgctctctaatgatcatgtattccttatgatcagttaatcaaccattcataattgcatttgttattaccaccatcagtttgatgactcatccagctcgtgatcacttcttgtttattttatatacgtagttccatggaaaagttttcaaatttcccattagcattagaaagttaaccgatctgcgatgcattagttgtgggcgatcaaatcgatgccgagacgccaaacgtgtctaattacataattggtgctttgaccgaatcccaagaaataaggggactaagtgatcttgtaagc

SEQ ID NO: 42857 - DNA, 1134 bp, DROSOPHILA
tggagtcgagcagctgaccagatcaacatgaggccataccaagtagtttgcatcgtagcagtagcagctctgctgcttttggaggcgattcccgcggatgcaaagcggcgcaagcacaagggctccgatcatcactatgaaaagtctgatccccacaagaccaagacaaagaccaagtggtctagctccacggatttggctggaaacactccaatttccaccgaagagcacggctactatgtaaagcgcacctttgcggctcccggtgagattggagccgcacagaagcgtctaagtcccccctatttggccattcccatcgcctggttcagctgtgagtcgggccagaagaattgccagtcttccaattccgcggctatcaacagtgccgcgcagtccttgagcgagggctatctgtgcgacgatgattgcgatgaactgtacgagcccatctgcggcaggaccacctcagaggtggccgttttctacaacaagtgcaagttgggtgtagccaagtgccgatcccacggtctttggacggacttcgcctatgccgagtgccaggcgaaatatccgcaggaaactgcctatgccgacaagaagttccggtcatcgccttatttccgggatgcggccatcgtggagcaattgaagctggaggaggagaagcgtaagcaggaggaggaacaacacaagctggagaaggagcaaaagaagaaggagaaggctgagaaaaataagaacgagaaggacagcagcgaaagcagcgaggagaaggatgaccaaaaggaaaacaagcagaaggatcccctttccctaatgccacagaagaaagtggaatccacccagaagccagtgccagttcctattcaagtagcagttccaaaaccagtttcagttttggagcctgcaaagacgaccgaggacatcgctatgccgcctatgccactgaaggacactcccacgcccaaacctctggagatcgcgccccttcaccagcagacccaacccaagggcaaggacattgataggctcaagtaccaagtagcttagaaagcaatggctacacaaatctcacctaattatagtatttatttaatttattacaacaaataaaattctaaacaacgataa

SEQ ID NO: 42858 - protein, 341 aa, DROSOPHILA
MRPYQVVCIVAVAALLLLEAIPADAKRRKHKGSDHHYEKSDPHKTKTKTKWSSSTDLAGNTPISTEEHGYYVKRTFAAPGEIGAAQKRLSPPYLAIPIAWFSCESGQKNCQSSNSAAINSAAQSLSEGYLCDDDCDELYEPICGRTTSEVAVFYNKCKLGVAKCRSHGLWTDFAYAECQAKYPQETAYADKKFRSSPYFRDAAIVEQLKLEEEKRKQEEEQHKLEKEQKKKEKAEKNKNEKDSSESSEEKDDQKENKQKDPLSLMPQKKVESTQKPVPVPIQVAVPKPVSVLEPAKTTEDIAMPPMPLKDTPTPKPLEIAPLHQQTQPKGKDIDRLKYQVA

SEQ ID NO: 42859 - DNA, 5247 bp, DROSOPHILA
aatgtttttttgtattgaaagtatatttaaaatatctcaagttcaaactttgatttttgtaagaaagattacgctcttcgttattttttgacatctagccccattattttaccactaagtatgatcggattttttaacaatgtcagaggagccaattttcatcacccactcatgaggtgcccaacatatgaatatgtcaacttttagtcccaccgaaaccaacgtcttagacccggctgtgataattagcgcaattcgtttttcgtcttctgcactcgagcgcctttctagctatcttaatttatgtacttacgtttagcacaatttacgtttattttttctgaaactttagcaacctccgaggctctcaaactgcaagttacaaacacaatcctttcgctttcacgctctctcacaagcacacgtccacacattctagtaatctaagccaagtttttataaatattgtaattatacacctgaacacgcacacacacttgcacacaaaaagacagggtgaagacctaccaaaccaaaaaaaaaaaaaaacacaattttcaaaggaataaatgtttaagaagccaaagaaattgtgcgtgtttagctaattttcccgatcgcaaccaaatggagaaaagtaatcggcgagctatgcaaaaactagtatatttcatttcataatacaataatttatgtacgctggcgtactttacatatctttgtgtttcctttcgtagttcgtagttccagtagtataaaaattgttcgaaaaacacatacgaaaatgatagtggggcaaagtagttgaatatccatgatatgatgattagcaaacacttttggcttaaaattaaagacatgacatgaggtgtgcggggagggcggggaaaaagacataaatatctaaatgtaaactgttgcacttaaatgaaatgaagccagggcgctgctggctgctctccctggataagtataaaaatatgcttcacggccggcgcatttaaatgttttccacgtgccacaccttggtgttgcagtcctgtccggtggagatcacagtgttattgtccagccagaccaaccgagtgatttgcgactgcggatgggcatctggagtgggcagaaaacaatatgtcagatatcgcttaaagcttactactctttttgaaatacttactcttgatgatagtatgtttggccggattggccacggaccagataatgatagtagtgtccaatgatccactagcaaccagcagcgagttgggcgaccaggccaccgtatttacgcgagcactgtggaagccccactccttgttgtgtgcaggcttttaaaatacactcgattagtaatggaattaagacatttatgattccttaataccttgtactcctccactgagtagagcaccaccttgcgatgggcatcgcaagccaccaaatacttcaagtccggcgaataagaaacatccgtgacagctcccaagtgatccagctccactttgggctccaatactccgcccttcagggtgtagatgtgcaacttttggtcatccccgccgacagcaacatcggaagtgtccgcattaacggcaatcgagctagcctcgtacttaatgggcagcgaaaagatcttcttctggtcctgcacgagagtcaactctttgatgcaagcaagtgcaatgatgttctcgttgcgcaaaatggccaagccacgtggctggcagttaagcttcaccacatagtccgtgtaggagttgccctccacgctgaactggcgtaggctgtcgtcgatgccacaggtatagacaaagtcaccccaggcggcaatgccgttgatctggtttccgtgtccagtgcccgtgatgcgatcgttggtgccgctgcccgagttccagttggtcaccacgccatcgtggctacccgtgtatatggtgctgcggtcatcgctcagtcccagcacggtgatgggcttattgtggcccttcaccacacgcagcggtttcgagggatccgccacattgaggtaggtgatcacgcccgaaagcgagacggtgattaggttgtctccttgccacaagcaggacacctgctggtcgtccacagtggtgcccatcacaaactcgctaaccagctcgcgcgactccactgtccaaaggcggcacgtcttgtcgccggagcaggttagcagttgggtgctgtctggtttccaggccaatgcgtaaacgccgcccttgtgggcaggagatccaaattcgcccaccagttcagagctggtgccatcgtacagaaagactttgccatcaaagccggcggaggcgaagaatttgccatcgggcgagtagcgcacagcctggacgaagcgagagtgatcctgcttggtcatcttgaacttgaacgggggtccctcgaacacggcgatagtattgtcttcgctgcctgtaataacaagtgtgtgtgtgtaagtaagtttattgcattttgggactattatgtgaactcacccgtaacaatgcggaatggcctggctggccggaagtccgccgagttaatagacttggactggccactgatctcgcccacagacgtgccggtttcagacataaagacatgaccgaaacgttcgcgtccttcacccacggcaacgatgcgctgattgtctggcgaccagctaatatccttgatgggtcctgcaatgggctggaactcatttttaagcaggtgctccttgttgaccgtgtcccaaatgcgaatcttgccggaggcgtctggtgagaagaggagaaagccaaataaataacattgctcgcttcaaaaccgcagataagataaagaaaccgctccaaataaggaaatgctaatcatgaccgtggcgtgactcatagtggtcacgatttttatgctctgttgccgaaagccgggtgctccaagtgtgaaattgctgggcgagacttaccaccagatgcaatataaaatccgctgggcgagtacttggccacgttcactgcacacgagtgctccgtgtagacatcggcaatggctggattctatggtgcggaagaaagggaaaagcatacatacatattttagagacacttttagcaaattaaaacaaattaatggtaaatgggatcctaattatgaacataggtgtttggttttgaatttgttatgtatgtttccttcattaacatttcattttccagaacctgaatatcttttggcggaagattttatttcttgatcattaaagataccatagaagtggcgggattatcgggacaaaagacaaagaaacatggaaatattttgaatttataccgattcaatgggtgaaagataggcaaacacatagctgctgtgaagaatcactttgaccagatgaaaacatcataatgatgatgcgtgggcggcaaacaagaaatgtatctatgtgccagtctgtgttttgccggttggcctgtggaatgggaatctgtgttttgcgccttatatactgtacatatatatataaataaatatagaacagctgcccgaaagccagaaagcacacacaaactggcaacagaaactgcagcctgtccaaaaataaaacaccatttggacgtaaatgccatggatttatggcaggaacggagcagcaggctgcagcatatatcagcttacctcgatgttccggatgatcacagagtttccattggtgtacaggaagttcttgcccttgggatcggcacccaaaacgatgggttggccgcgttgggtgcgcggcagagttgcgtagatgttttctgcaattaagcgattatttcgattagaaatgggctgtgactgctgctactcagataacgccggcaaattggagtgggtggaaaatagggtgcggcttcgtttttggggagcgaacgggaacggggtcgctccaacggctccacacgcgcctcctcttactgcttaaaaaggtctttcatatgcatctatgcccatttatgggcataatcacggtgcttccggcgattgctttctgcttttaccgtttttcgcctgttgactcatccccctctctacgtatcacattcggagtgggatcggattcatgactccagtttatctctgtgggattccaactcactgttttcgtacgccggtggttggggttgtgccattctggtgatttctcggtgctcctgaagcctttactaattagtgcgaaattccgcggataaatgaaaacaccaaactcaagttcgccgacgattagtggtgggctaagatcgatgttttcaccatcgtcgtcatcgatggttttttctttgctttatatcgactttgcgctgcgtttacccctttttaacagcgaagtgaactggaaggaaattaaaaatatattgttctgtgttttatactaacagtaactactaattgctaccgtttttaattatacactaaaaaattgtttttttttttgggattgagttttcaatttcctatatttgaaaaggaaatatataatcaaaattgtatttttatctaatttaataaaatgtatatttttcaaaaactatctaaatatcgataaattgcgccaaataaattaatcggtctctgtggttccccacctctaccattgtttatatttttcattttccgcaagaatgatgcaaagatttccgacgcaggcgaccgtggagaatccacgttatggacagctaatcataggacctcctggttctgggaaaaccacctattgcggtgaggcccttaagttctatcgcgaactgggccgtcaggtgggcgttgtgaatctggatccagccaacgaaaacatgtcctacgaaccggtgctaagtgtgatggagctaatcactgtggaggattgcatggagcacctgaagctgggaccaaacggagctctaatgcactgcgctgagtatctggccgaccatttggaggattggctgttgccggcactgcgcaaactaagcgccacttacaactacttcctgttcgactgtcccggccaagttgagctatatacccatcacaacgctatggcccggattttcgagcgtttggagcgtgaaagatatagcctggtcaccgttaaccttatagattcccattactgctcggagcctgccaaattcattgccactttgctgatggcattgaacaccatgttgcggatgagtctaccccacgttaatgtgctttccaaggccgatctgctaaagaagcacgagaccaagt

SEQ ID NO: 42860 - DNA, 1911 bp, DROSOPHILA
cgaacttgagtttggtgttttcatttatccgcggaatttcgcactaattagtaaaggcttcaggagcaccgagaaatcaccagaatggcacaaccccaaccaccggcgtacgaaaacaaaaacatctacgcaactctgccgcgcacccaacgcggccaacccatcgttttgggtgccgatcccaagggcaagaacttcctgtacaccaatggaaactctgtgatcatccggaacatcgagaatccagccattgccgatgtctacacggagcactcgtgtgcagtgaacgtggccaagtactcgcccagcggattttatattgcatctggtgacgcctccggcaagattcgcatttgggacacggtcaacaaggagcacctgcttaaaaatgagttccagcccattgcaggacccatcaaggatattagctggtcgccagacaatcagcgcatcgttgccgtgggtgaaggacgcgaacgtttcggtcatgtctttatgtctgaaaccggcacgtctgtgggcgagatcagtggccagtccaagtctattaactcggcggacttccggccagccaggccattccgcattgttacgggcagcgaagacaatactatcgccgtgttcgagggacccccgttcaagttcaagatgaccaagcaggatcactctcgcttcgtccaggctgtgcgctactcgcccgatggcaaattcttcgcctccgccggctttgatggcaaagtctttctgtacgatggcaccagctctgaactggtgggcgaatttggatctcctgcccacaagggcggcgtttacgcattggcctggaaaccagacagcacccaactgctaacctgctccggcgacaagacgtgccgcctttggacagtggagtcgcgcgagctggttagcgagtttgtgatgggcaccactgtggacgaccagcaggtgtcctgcttgtggcaaggagacaacctaatcaccgtctcgctttcgggcgtgatcacctacctcaatgtggcggatccctcgaaaccgctgcgtgtggtgaagggccacaataagcccatcaccgtgctgggactgagcgatgaccgcagcaccatatacacgggtagccacgatggcgtggtgaccaactggaactcgggcagcggcaccaacgatcgcatcacgggcactggacacggaaaccagatcaacggcattgccgcctggggtgactttgtctatacctgtggcatcgacgacagcctacgccagttcagcgtggagggcaactcctacacggactatgtggtgaagcttaactgccagccacgtggcttggccattttgcgcaacgagaacatcattgcacttgcttgcatcaaagagttgactctcgtgcaggaccagaagaagatcttttcgctgcccattaagtacgaggctagctcgattgccgttaatgcggacacttccgatgttgctgtcggcggggatgaccaaaagttgcacatctacaccctgaagggcggagtattggagcccaaagtggagctggatcacttgggagctgtcacggatgtttcttattcgccggacttgaagtatttggtggcttgcgatgcccatcgcaaggtggtgctctactcagtggaggagtacaagcctgcacacaacaaggagtggggcttccacagtgctcgcgtaaatacggtggcctggtcgcccaactcgctgctggttgctagtggatcattggacactactatcattatctggtccgtggccaatccggccaaacatactatcatcaagaatgcccatccgcagtcgcaaatcactcggttggtctggctggacaataacactgtgatctccaccggacaggactgcaacaccaaggtgtggcacgtggaaaacatttaa

SEQ ID NO: 42861 - protein, 608 aa, DROSOPHILA
MAQPQPPAYENKNIYATLPRTQRGQPIVLGADPKGKNFLYTNGNSVIIRNIENPAIADVYTEHSCAVNVAKYSPSGFYIASGDASGKIRIWDTVNKEHLLKNEFQPIAGPIKDISWSPDNQRIVAVGEGRERFGHVFMSETGTSVGEISGQSKSINSADFRPARPFRIVTGSEDNTIAVFEGPPFKFKMTKQDHSRFVQAVRYSPDGKFFASAGFDGKVFLYDGTSSELVGEFGSPAHKGGVYALAWKPDSTQLLTCSGDKTCRLWTVESRELVSEFVMGTTVDDQQVSCLWQGDNLITVSLSGVITYLNVADPSKPLRVVKGHNKPITVLGLSDDRSTIYTGSHDGVVTNWNSGSGTNDRITGTGHGNQINGIAAWGDFVYTCGIDDSLRQFSVEGNSYTDYVVKLNCQPRGLAILRNENIIALACIKELTLVQDQKKIFSLPIKYEASSIAVNADTSDVAVGGDDQKLHIYTLKGGVLEPKVELDHLGAVTDVSYSPDLKYLVACDAHRKVVLYSVEEYKPAHNKEWGFHSARVNTVAWSPNSLLVASGSLDTTIIIWSVANPAKHTIIKNAHPQSQITRLVWLDNNTVISTGQDCNTKVWHVENI

SEQ ID NO: 42862 - DNA, 15966 bp, DROSOPHILA
tctaattcggcatacgccagtgattttttaaatataaacaatggtttcgtctagctgaaactagcttcctttctgatttttaattatacaaattccaaaattcattggaaaacaaaatgttccgaaactcaaaagaatgaaaattttggaagcccatattaaaaaaaaaaacgagacctgtaatcatttccagttctggttcccattcaattgatgacacttgtgcgaaatcagagtttatgcgaatacaaataatcgtttattgcgaaacaaacccgaaaataaacgcggatgataatcttttgactcactgcactggttctatgcatggggcttagcccccaaaaaatggctagatagtacaagttaccccacgaccagtggcgcggtttccactgcttccgctctttgtagccctttttcgggctcttctgctgcgcttcgttcttcgttcgtgcttcttcttctccgacttcatcgccgccgtctcctttgccgctctctttgtaagtgcagctcactcccactcgcatatgtacatacagagcccggaatacttggagtgcactgctccctcgcgcaatttatgttctgttcgagtacatatgccgcatacatatgtacgtgtgcgagtgtaggaggttgtcagaggtcagtctcatcgccgcatgtatgtaggtatgtacatgcatacaaacacccgttccaattgccaatccattccccgtggcgttctgcagaaactagatttcccgctctctctcggtcccgttcgctggttctttgtctctctcgctctcccgctggctaaaactggttgagtgagttttttcggctggccgcttttgtcggcttggttcgttcgttccgttcccgttcgtttccgttcctcgttccgcgtcttgtaaaattcttcttcgccatgctggttcattctcattcagttcttaacactcgccggataaacaacagtttggcgcttgttcgcgttcacttcccgtcgcgttcagagagaatacactactactgctgctgctagtgtgtgtgcgtgcgtgtgaactgtgcgaaaagaagcaatataaagtattaatactagtggaatattaagtaaatctaagtgcaacagaaacatacacatacctagcctatgtacgtatgctacaagatatacatatctgcagcaaataaatgttaactcagtatacaagcgaacaaaagcaccagaaacaaattgtttagttttgctgctcattcttcttcttccaccgatgccgtagagttcatcaacttgtttagaatcgcgtacgtgactgtatgtatgcctgtgtgagtgagtgacagtgtgttggtgctgcctttttcctgctgcgcttcctcttgctcgtgcatctatctctttctggcggcgcatcacttgcattgttgctgttgctgtttgttgcaatgcaacaaaacattttattcttgccttttccccctcctggtcttcgcctcctttggcgtttgtttatgagcgtgtttgtgtatgtgtgtttgttcttttcgacgtccgcgcgcattgttgttatttgcttgcattaacttctacgtttctacgcttttgttattattatctcatttcttatttagctctgcgccacagtctgctctccacagtcacggccagcagttggtgtaaaagtgtaatgttgatgctcgccaaagacataaataaaataagagtgaaaaatgtagaaaatctaagatattttttcagtttgtgcaatactacaaattcgcttgtacatatcccctcgaccttaactttgctttcatattctctttctgcggaatactattctgtatattcccctggtcaataaccactgtatttgcaagagcaaacaataatctgataatgatgaaatggtttatcaacctctgaagcctagaggtgtgcacacttccttcaactccaatgcgcgacgaccttcccccggccaaaaagtccgaaagtcgagcctatttatcgcgacacaactgttcaaacaattccccaacaacattcgattcgcgtcggcagcgactgtgttcatgggtattgttgtggatatcgttattgttattgcatttgttgttgctgttgccgctgcgatgcggaagaataaaacacgagtttgttttcttgtttctgtgtgtattttaaaccaaaattattacggcaatgttctttaaacttaatcactgtagactgacagactgatcgacgtgcaaaccacgcttggggcttctcattaatatacgaactgccggttcgagtgagttagtgagtgcctgttttatttacgccgaaagcaaaaacacaagaggcgaaaacaaaaccgaaaccaaaatctaaaaacgtgtttcaaatttgttcctatctgtgttgtgtctctgggtccagtatttggggtttggcgtacaagcatgtggatatggatacgagcagaacggaaagacgaaacataacatatcgaatgctatttactccatgtgtcttgtttcacgctcgatttgcgtcgccagcagagctaagaaataaaaaactacgcttactgattaaaaaagctgtcgccgggctttatattttgcgtcgaactgattgtgtgcagtgattactcggaagcgggaattagaaaggaccccggccagatatttatttgattaaaaaatgcaaaagcatgctgctagcaacagaaaagaagattgtttaaattaatcataaaattgcactagtttttgcactagtttacactttatactttatcgtaaacaccagctcgggcaacctttttgaaaactcgagaatttactgtttataaataggtacaactgtaccctaaacaaacagaagggttgaacaattataattttatgtttttttccttgtttttctagctcgttactgtattgtttggagcagtcgaaagtaatcttcttgggtttacctaaagacttacaagtctgatctaattcacttttattcgcattcgcccagtgatcactgtagattaccagctgctttgaagattttctgatttacaattcagatacaattgacaacgatccttcttttatcaacagcgatttgggccatctccaatcgattcgccatcgcaacccgaacgccttgtgtaaatgcgtttcctgtgctgttttgttactttctgagattttctagaactcggtcggggtcgttcttcttccctcttctgtccccgccaatctttgtcgtaccaatttcgttgtgttttgctctgctttgttttgggttcatgtgcgagttttcattatcagagagcgttgcttaccaccacgtaatagataacgcaggcaacccgaagttggtacatctctaattgaaaatgttaaagtagatagcaaatatttatcgaaagttaacacgaaaatgaggcgtacagagaacacgttccaattgattagatgatgttgcaccacaagacgatggcatgtgcatctgcgtttaaacttcctttatgaggtgaaatatttagggcctatttaagcttgtagatacttttagttaatttgatcttttgcacacttggaaatacagtttgctctcacatctaaccttggaaaaaaacaaaggaagtgagtttgctctcgactattttgaagtaaagagtgcgcgaatctacatagaaagtccttatatggtatttcgttttacttgaccaaaattctgaatggaatggaatattcccagccgacactgtacctgtgcaaggttgcgtcgatattttctaccaccactgtgcaggacacacagacacttgccatctcgctcgccctcgctcacagtgcagcaggagagtgggggaagaagcggcaactaacgaaccacagacactacaaagcgcagtaagaaagaaaaatgttgtgcagaatgaaaaaaaaaacaagaacagacaacagaaacgaaaaaagaacaagaactgcaatgacgacgccgttgacctgcggggcctttgatgcgagtgggaaagagaaggagatggatggtcgtgggagaacggcccgtggagaagagcgagcggagagtgtgaaagaggcagaggagaggagcgtctgggatctcgggaccctctgctaaattggatgctgctattcttcttcttctgctttacctcttccttcattccctcgccacccatgcatcgcgcgactacaataaaactctcttgtgcagattttgttgttcttggattttcgcccattgtctccttcaataaaatgcgtcaagtcaatttcattcaccagcagctgctgctttgggggtcgcttcgctgctgacgcatcgctggcgtcgtctgataaaaaaaaattcaacaaaaacccaaaaacaaaaaaataccagagaagcaatcgtcgcagaattcgacgaaattcacaagggaaaacagtaaaatagttaggcaagaacaggagatacattccagtaccccttccctgtcacttgtcttgagtcaacttgtcttacctagctcacgaaacgcaaaacaatataaagactggagatatgaaattacatccgttcaataataaaagtttacatatgctaagttataagatgaagacgaggagcaacgacatgataaaggattaaaagattctaataccaaccaatggtggtattaatcggattagactttttgaaatactttgttctttccaatcctaaccgaattttcgttcacaatgattaacatcaaaagaagaagattcatgataatattgatatccagatcctatcttaaaaacatttgctctttgccaatatctactgtagcgtaatttgcatcaaaccaaggcagctgcggtcgtgatgctggcggtgcctttgcgatgaaatcgaggatgcgaatggaatgggatggtcgctgtaggatgggatgaagattggaattgggatcgggacggatattttatctgccgagcgacggcatttttgctgctgtctcgcttagaagagtgtgtgtatgtatttgtggatttgtgtgcctgtcaagcaggtaaaggtagtttctttgttctgttttatggcttgctctttgtgctgggcttcttttacttttcgctgcatttgagtacgtctgtatcctcgacataaagttgcggtcagaatattgggactaaatcactgaatgatgtttaagtggttgcaagagcaccatatacagctgaatgttgcaaagtaatttatatattattttaaaacgagattcgctctcattagcttttaatattaaacatgtatagagaccattcaactgttcgataaatcgtaaacaagtgtaaatctatttttctattaaaacttgggactattttgcattttgacatacgcaccgcacaatattatgcccaccactgttggcagtgggtgtgtgtgtcatggtaattgcctttgtttttgctgccgctattgctgcttttggtaccattgaactctgctgcagttgcaaccccaaaaacattccgcaggggaatgcatggaagttgaacacagccttgtttattttgctgcacaaccagaacgaacgccctgcctcctctagccccatctctttgtagttgtttttgtgggtttatgcatttttgcggaattacagtgaagcctcataaaatcgtctaaaattctcataagtcttttcaaagatgtaaagcactgtacagtagggtgcaccatcgatgactggttctaagttcacgataggagcgttccactgttgtttcacgtacagtcagcaccccctattttctcccacacaccatcttgatttggcttgaacttggtgctgcgcgctcttgttcccgatcattattttttccataatcatcgtcatcagcagcacatcgcaatgcctcgctttgttttctcttcagttcttctgagccatgaaatttataatcttgtacaaattgttttgcattagtaatgcctgtgcgcagtttgttccacttctcacatggggtaaccacgtcggttctttagctccgcttcgctttgctccctttcttgtattcttattcgttcttccgccgtccctcggttcttcttcttttcttctcgtgcttaattatggtgggaggagggcggcagggtgttcgggcacgccctcagtgcactgcactcgcatttctgattattagcccgctctatttttaaacacttttacaagcggtctggaatttgtccgtacaccccctgctacacttccatccatccaccaaaaaaaaaaaatactgctaagtaaaacatatggcacagacattgagctccactccctcttctcgaaaagtggaggcgattccattcttctgatggactcgtggccccaaatgatattaatcttgtcatgatatacaataccaactgtcagtttgatttggcccgaaccgttttaccactcttccgtttgttctccgtcaactagtcaactatctcccaaaatttgctaatctaatcgatagacaactcgttcattatcaattcccctcgttccccccgccaagaaacgctaaattattgtttttgatgctctaattaggggtgttgcacttttgacatgttggaagtgtgtattttagacgcctaactaaatatagtatagcaggtttacttacataaagattataataactttattaatcaattatactataaataaaataataggttaatataatagaataaagtcagagtaaagtgaatttttgtgattcaagggtatttcagaagttcatgaagaaaaaaacccatgtttatgtttggtttccactttgaacggtgacgttttggtgctattcttgtatttattaactaatttgttgaaattaccggtggtagatttatgagtcaggttttttttttattcctacgctcatgtatgtgcgtttcaggtgtgatcgataccttttgaagatcaccgcttgtttttttgttgccctccctcattttccgcgattcgcaacagctcgtaatgttgcagaagcaacattaaaatgccgctattttacacgtgtaaatttgtatttcttttgaatgtgtgtgtgcgaatttatgtgcctgtcgtctggctattttcccctcatctcttccgctcttcgccctcttgggtcttttgtctcttttccgctgccgcctttgtcggtatacagaaattttcgctatgcagttatgttgatgagatgtgaatgcgatgatgctgctgcaacgtcatttctagcatacttgtctcctctcttcctctcgaaagttctgcggcaacatagaacagagaaatgctgagtgaaaggaataggcaaagcagagggagagaggctggtggccgagagaacgtttggttgttattgcttttggatgcggtcgttgcccaaattggaaaaaaacatgcgcacagagtacactgaaaagaaccagttttgtaatataaataaaagtcgatattatttggcatagagaatattttgatttttgattagagtatgggaaaaaatttgcattaagatatactctcctattttaatgtatcttttatcaacacgggatgaaatttcttttcgcaaagtctgctacgtttttgctgtgtgtatttatcgtttatcgcttcctgcttttgttgcgcttttctcttgacactcgctcttcgctgctctctccacgctctctttcgttctctcacgcaacctgtagcgcgcgcaaaaaaaagtgtattttggcgtggaaaattgttgctctttctggggggaagtttcctctttttatttattttgttgtgggtgactcgccgccatattgttttaggggttgctaaaacataagcgcaatgggggtggtgatgtgtgcagttgtattgttgcttttgcagccggcattcaacagttcggcaaaaagagcgctcattttgggaatcgtctcgcgttggtcgctctcttagtaaacgtaaatagggtgtattgatttttcccgggtttttcgccactttgttttcctgtctttctggaagttgctcggttaacaggcagccaaaaaattctcagactgtctgtggagtgtgacattgcattgcatggctgcagttgcggagtagttgttgttgctgggagctggaaaatccccaggacatttgcagctctctgtcgctccgctgtcgcggccactgccggcgtcgctgcttttgcggggacctgagctttacccgggtcgctgcattatgcgcagagttagttttgcagggagccgcgtagcattcacgtcacgcaatttgtacataactagcgaagattttaacattacattagtttgcagtgtccttgccgacgcacgacgtcactgtaatgcataaaataaaccaaaaacaagagctctcaattaaccttgcattcaattatccttcctaataaccatttttctctctcttcccattgcagccttttgtgcgcgcgacgcaattatctgacagcacttgaaagtatgctacacaaatttgtttcaacttgttactgcaacaataacaacaaccaaaacaacggcaaccatcccacgcaatttatcatatagactgcgtagcaagcaagagcgagacagcaacacggcgcaaccagcagcgagaaacaacaacaacaagcagaaatcaggaaaccaggaaacgaactggaatatatagaaaattctacaacaaactacaacaacaaagcagtaaaggtaagtcggcttatctccgtttaatgagttttacgtttagttttcgtcgttgcacagttttccctttgttggaaatttaccggtagatatattttacatacatacattcatatatgcagctctttatcagggatttctcgcgcccatatttggtatagctattcagattaggcggcaactaaactgtaaatataatttagctttataatttgaagtccctaattatttgcacaggaactggaagttggagataaatgtttttattcttgtaaattaaataattatttacctttatttaccgttatttacctttaatggccttccgtattcttctttttatttgtaacaaacttactattccaatgtttctaagaatggattagcatacctgtacctacgcctagagggctattttgggcaacccaattaacctcaaagttaaacaaagtaatatccttcacgacgaaaaagtgaatatttgtggagctagaaaggactttctagggagcattgggaaaaggcattaggtctgggtgtatgtgcatgataaatgtacatccagtctagacagttgcagtcacccttcccatccctctgacatatacaaccttccccccttgggcgcatttttcggggttgattttcagctgcctctctttgctttcacttggattgcctttatgttggctttcttgttgacgaaagtttcgcctggtctggaaatctagagaagtttctccggggctccacagttttccttattttgtttttttttttgtttacttttttgcgacgggggcttgttgtgaaactccccgttcgttttccctgcttttactgctcgcattctacccaacttcagattcgccgtccttctcgaaggcaacgaaccgcgaaggcagcgaaaaggggaagtaaaattatgattacggggtgtcctgtcctgtcctgtcctgtccgtctgtctgtctgtgcgtgcgtttattgcatttgtgtccgtctccgcgcaaaggataaaggttagggggtagtagatgtagacgggcagcgatttcctccccggtcaaagtccttttatccaggcgtacagcttcacttttagccccgcttcttcactctgccgtaagaaattggaattgtgtttaaaagcattcggtgggggcgcgaatcctagtttgattcgattcagtctgttgggctggggaaatagtaataccaaggggaatacacaagccacatacctttcaactgtcgtcttcgaaaatgtttaataaaacacggttcacagctgtcgcgctttgggggattagatggagcatggagcaggatgaaagcaggattggaaggaggcaattaactacaaattatgataacaaaggggatgactaaggaaaaggggccgttgtttgtggggtgtggcacatttgtttgtttggaggggccatggaaatgccacaacgttttggttcaagtggaggaaatgctgactcacaaggataaaagacaaggaccgcaggtgactcatgggtcagtcgatttgaggggcgaaagtggcggagagtaggcgaaaaaaaaacacgtggttggcacaggaagcattgaaaccattgctaagattattcaccttcgttgtggggaacttaaatcgattagattataagtccgtattttccaataaatgtattcattgtctacattgtttaattaatccctccacttgttctttctccttgcagctgttactcctaaaggtaaacggagccaccgacggcacttacaacataaagatggcgtcctcaccgacaccatctctggactcgatgcggggcggggcgaactcgattgaatcgtacgaacacgccggctatctatcagactctccgctcacgttgagcggttcatcgccaccggcaagcgattcggcaatctgcagtgatgagtacacgggcggcagcagcgttaaatcacgctctgaggtgactgtaatcaatggccatcatcccatttcggcctccgtatcgtccagctcttcggccagctcttcatcctgctcgtcgtcatcgtcctcatcctcgtcttcgtcatcgtccagctcctcgaccagcggcctcagcggttgcggcagtaccagcagcagtgtgatcagcgccaacaacgttgcgagcagcaatggaccaggcgttatcggcagcaatcttcagtcctcaaacaatggcggcaactcgggcatcagcagtctggtcgtgggtgcgggcaagggaagcaacagcagcagcaacagctcctcgagcaacacatccgccaatggatctccgccacgttgcaccgcctgcaagagcaagtgcagcgatgcggtggccaagtgcttcgaatgccagagctacctgtgcgccaattgtgtaactgctcatgagttcatgcactgcttcaacggacacaatgtgtgcctgattaagggttttgaggcgagcaccactggcactccgctgtcggttggatcgcctagcaacaatccggcgtcgaatgagttcaagtacgccagttcgctgaccatgatgctgcagcagcagcaacagctcgactcgcaacaacagcaacagcagcaacaattgctgccggcgcagcctatgtcgcaactctcgaagattgtactggcagccgccgcgcaggcaaattcccaggagcaacagcgagaggatagcatctatggttcactgcacccacaacaacaacaacagcagcagcaacagcagcagcgacaactcttctgcccccgacacaaacaggagctgctcaagttcagttgccgcacctgctgcatcctggtgtgcaaggagtgcattgtactggagcactccacaggtctccacgaactggagaacgtgcagtcccccggaatgacaacctctacgggatccacagccaacgagtcagctttgcagactctgctcgccgatatgcgtggcaaaattggcgagattgtcggcattgctggaaactcggaccagaatctcaccaaggtgaagctgcagtaccaaaaggctcacaacgagctgaacgagacgcaccagttcttcgcttccatgctggacgagcgcaagaccgaattgctcaaggaactggagacgctgtacacggccaaggttaacagcaacaattcgtggcagcaacgctcccgcgacttgatcgacaagggactggccacctgcgaggcggtcgagcggagtcctgctccgccatcatccttgctgacagaggcccttctcctgcgcaaatccctggagcaacaactacagacgggcattcaggagatgcagctaccattcgagatcgaatttatgtccaactatcagtcgattcaggccggcgtgcgcaacacctttggttacattcgggcaaacagctcagatggtggacctactggcatgagcctgacgagcaatggccacggaaagcagccgccaattgcccgaccaacacagagcgccagcaacagcagtgcgagcagcgcgggcagtggtcaccatggccaccaccaacagtcacaccatcatggccaccacaatcatcaccagacggcccatcatcaacagctgcaggcgcaatcgtcgctgcatggcttgggtcttggattgagtggcgccagtttgttggatagcagctctagcgcaggcggagcagtgggagccttcagcaacggaggacttctgctgggcggtcgcgatcggaacgctctggcagtggaacagcatttcggtgagctgatgcccaagcgaggaggaggtggctacacgggcagcaatggatcggccaccagtgccgtggcccactacaatccctacgagaagtggagcaacggcggtagcgacaatctgttttcatcggtgacaagcggcgtgtccggtagctctgcagtggccgatgcatttgccagcctgtctgctgttggaggatccgtggttagtggcgctggagctggcggaagtactgtgagctcagagtcgttgctggacctcaccaacaagctgctttcggccactatctatccgcccaagtcgcagatcaagcgacagaagatgatttaccactgcaagtttggcgaattcggcgtgatggagggccagttcacggagcccagcggtgtggcggtaaatgcccagaatgacatcattgttgcggatacgaacaaccatcgcattcagatcttcgacaaggagggacgcttcaagttccagtttggcgagtgcggcaagcgtgactcgcagctgctctatccgaaccgcgtggccgtggtgcgcaattccggcgatattattgtcaccgagcgctcgcccacacaccagatacagatctacaatcagtacggccagtttgtgaggaaattcggggccaccattctgcagcatcctcgcggcgtgaccgtggacaacaagggacggatcattgtggtggaatgcaaggtgatgcgtgtgatcatctttgatcagaacggcaatgtgctgcacaagttcgggtgctctaagcacctcgagttccccaacggcgtggtggtcaacgacaagcaggagatcttcatcagcgacaatcgggcgcactgtgtcaaggtgttcaactacgagggccagtatctgcggcagattggcggcgagggtattaccaactacccaattggcgtcgggatcaactcgaacggggagatcctcatcgcggacaaccacaacaacttcaacctgacgatcttcacgcaggacgggcagctgatctcggcgctcgagtcgaaggtgaagcacgcgcagtgcttcgatgtggcgctcatggacgacggcagtgtggtgctggccagcaaggactatcggctctacatatatcgctatgtccaactggcgccagtgggtatgtaaacacacagacacacacactccatggatgtgagtccggaaaggaggaggatctgtggtccggcactcactacttctataggctaagttctcaatagtctgacttgctcggtctctccagctctaattctaaatctacacaatcgaagttgaaatcgaaatctataagatccctactatctcccccgatctgtcatctctcatagccttagactttgctcgctatgtaataacacacacgcacactgttggaatgatttttattatcttttaaattattgttgaattttgttttattttttttatatatatttacactgttaagcttagtttttatttgtgcgtacttgtttatgataaatatatattatgtgtattcatgttcatgttcaaatcggatagtgccgccgcctctctatatctttgcacacttctcacttcaaaccctcgtatctctatctcgcgtgcaagtcgtattttcaacaaacacaagcaaacaaccgaaacaaacaaaaaaaatgacactttttaactatatatagtagataccagaagaaatccctccactttttttatgttcgttgccgactgcaaggaaaaaaaaggaaaaaaattatgaaaaaaagaagttggtataaaataaacttaacaaataaccgccaacaaaatggagccgcgtatcgagcattaattaattaataattgattgtaatttttagatatatgattgcgcaaattgtttgttattattatttttgattgcataaacatttgatacattatatattatatagctgttttttacgtttataaattatttttgattataccacttattgattactgattatttatatttatatacattaattaattatcctctaagacatgtttgctacttttatacgaaatcaaccgaacccaaaaccgaaccgcgacacaaacaacaattcacaatttttatactcgcttagaatttatgttttccattgttttattgtaaccacgacagcggaaagaaaagatggaattacctacctacaccgtaataataatgcagacaaaaacccactggcgattctttaatttaatttaaacaaaaacaactgaacgcactgagaatagttgaaatttttgttcttgattgttgaactattttttgtttaggcatttatattttaaaataatttcttcgttcgcaaggaagacggacgaatttgttgttttgccccaaaatatattactatattatatgcgaaaattatttgttgtcaaattgaatttaaataaacatggaaaaatgtgtatatcaaacgaaaacaaggcgatatttatgtgcaccaagttagttagtggtaacttcgagtgcgaattcaaagtatcttgaggatgtgtgtgcatagatctaattgagtatttaaaagtaacatttaactaaaagttggcaatcagcgcagaagacttgaaacatttataactattataattatacaattaaagtatgtctattaatatacgataaacacttaaatcagtaaatcaaaaatctcaaataattgaatagttataaagagaaaccgcgaatagggaaacaacatcccagccaagccagaccaatcgcccacttatgtttacttccttgacagaaatagggactaaatacgaaagccacacggtgggcaacaatcaggatatggtactcgaaggaatcgtcacatatcctcttgatctgttgcgcaccgtgtgcacatggacttctaattgcaatgatttagttaaagcatttacttggataggcctcaaatgatgattgcagagctaacaaaagtgttctttaagtaagggttagttaaaagcagttaggacgttagatatttaaagtgaacatactattaaggcaaggaaacacaactttttgagactacaaacgcaacattaacaggaacagcatttaaaaaatgtttattttgtaattttaaaagtaatcactatgtatttttgttggttttgcttggaacgcgacgcgaaccccgcccccttgaccccattgacacgcccacacgtaagcaggtattagatttcttgaatataatttaacaatattgtattaaacacgtagtatttaactaatatagtttccccccttcctcatcctctttatattcccttgtttgttttgaaaaaacgccttgctctgtgtaatttctgatttgcttgacctattattttaattatttgataattacctatgttttgtgtgtatctacttaagtgagattattaaatatacgaaaatatattttttagttctttctt

SEQ ID NO: 42863 - DNA, 5096 bp, DROSOPHILA
tcgcgttcagagagaatacactactactgctgctgctagtgtgtgtgcgtgcgtgtgaactgtgcgaaaagaagcaatataaagtattaatactagtggaatattaagtaaatctaagtgcaacagaaacatacacatacctagcctatgtacgtatgctacaagatatacatatctgcagcaaataaatgttaactcagtatacaagcgaacaaaagcaccagaaacaaattgtttagttttgctgctcattcttcttcttccaccgatgccgtagagttcatcaacttgtttagaatcgcgtacgtgactgtatgtatgcctgtgtgagtgagtgacagtgtgttggtgctgcctttttcctgctgcgcttcctcttgctcgtgcaattgcagccttttgtgcgcgcgacgcaattatctgacagcacttgaaagtatgctacacaaatttgtttcaacttgttactgcaacaataacaacaaccaaaacaacggcaaccatcccacgcaatttatcatatagactgcgtagcaagcaagagcgagacagcaacacggcgcaaccagcagcgagaaacaacaacaacaagcagaaatcaggaaaccaggaaacgaactggaatatatagaaaattctacaacaaactacaacaacaaagcagtaaagatggcgtcctcaccgacaccatctctggactcgatgcggggcggggcgaactcgattgaatcgtacgaacacgccggctatctatcagactctccgctcacgttgagcggttcatcgccaccggcaagcgattcggcaatctgcagtgatgagtacacgggcggcagcagcgttaaatcacgctctgaggtgactgtaatcaatggccatcatcccatttcggcctccgtatcgtccagctcttcggccagctcttcatcctgctcgtcgtcatcgtcctcatcctcgtcttcgtcatcgtccagctcctcgaccagcggcctcagcggttgcggcagtaccagcagcagtgtgatcagcgccaacaacgttgcgagcagcaatggaccaggcgttatcggcagcaatcttcagtcctcaaacaatggcggcaactcgggcatcagcagtctggtcgtgggtgcgggcaagggaagcaacagcagcagcaacagctcctcgagcaacacatccgccaatggatctccgccacgttgcaccgcctgcaagagcaagtgcagcgatgcggtggccaagtgcttcgaatgccagagctacctgtgcgccaattgtgtaactgctcatgagttcatgcactgcttcaacggacacaatgtgtgcctgattaagggttttgaggcgagcaccactggcactccgctgtcggttggatcgcctagcaacaatccggcgtcgaatgagttcaagtacgccagttcgctgaccatgatgctgcagcagcagcaacagctcgactcgcaacaacagcaacagcagcaacaattgctgccggcgcagcctatgtcgcaactctcgaagattgtactggcagccgccgcgcaggcaaattcccaggagcaacagcgagaggatagcatctatggttcactgcacccacaacaacaacaacagcagcagcaacagcagcagcgacaactcttctgcccccgacacaaacaggagctgctcaagttcagttgccgcacctgctgcatcctggtgtgcaaggagtgcattgtactggagcactccacaggtctccacgaactggagaacgtgcagtcccccggaatgacaacctctacgggatccacagccaacgagtcagctttgcagactctgctcgccgatatgcgtggcaaaattggcgagattgtcggcattgctggaaactcggaccagaatctcaccaaggtgaagctgcagtaccaaaaggctcacaacgagctgaacgagacgcaccagttcttcgcttccatgctggacgagcgcaagaccgaattgctcaaggaactggagacgctgtacacggccaaggttaacagcaacaattcgtggcagcaacgctcccgcgacttgatcgacaagggactggccacctgcgaggcggtcgagcggagtcctgctccgccatcatccttgctgacagaggcccttctcctgcgcaaatccctggagcaacaactacagacgggcattcaggagatgcagctaccattcgagatcgaatttatgtccaactatcagtcgattcaggccggcgtgcgcaacacctttggttacattcgggcaaacagctcagatggtggacctactggcatgagcctgacgagcaatggccacggaaagcagccgccaattgcccgaccaacacagagcgccagcaacagcagtgcgagcagcgcgggcagtggtcaccatggccaccaccaacagtcacaccatcatggccaccacaatcatcaccagacggcccatcatcaacagctgcaggcgcaatcgtcgctgcatggcttgggtcttggattgagtggcgccagtttgttggatagcagctctagcgcaggcggagcagtgggagccttcagcaacggaggacttctgctgggcggtcgcgatcggaacgctctggcagtggaacagcatttcggtgagctgatgcccaagcgaggaggaggtggctacacgggcagcaatggatcggccaccagtgccgtggcccactacaatccctacgagaagtggagcaacggcggtagcgacaatctgttttcatcggtgacaagcggcgtgtccggtagctctgcagtggccgatgcatttgccagcctgtctgctgttggaggatccgtggttagtggcgctggagctggcggaagtactgtgagctcagagtcgttgctggacctcaccaacaagctgctttcggccactatctatccgcccaagtcgcagatcaagcgacagaagatgatttaccactgcaagtttggcgaattcggcgtgatggagggccagttcacggagcccagcggtgtggcggtaaatgcccagaatgacatcattgttgcggatacgaacaaccatcgcattcagatcttcgacaaggagggacgcttcaagttccagtttggcgagtgcggcaagcgtgactcgcagctgctctatccgaaccgcgtggccgtggtgcgcaattccggcgatattattgtcaccgagcgctcgcccacacaccagatacagatctacaatcagtacggccagtttgtgaggaaattcggggccaccattctgcagcatcctcgcggcgtgaccgtggacaacaagggacggatcattgtggtggaatgcaaggtgatgcgtgtgatcatctttgatcagaacggcaatgtgctgcacaagttcgggtgctctaagcacctcgagttccccaacggcgtggtggtcaacgacaagcaggagatcttcatcagcgacaatcgggcgcactgtgtcaaggtgttcaactacgagggccagtatctgcggcagattggcggcgagggtattaccaactacccaattggcgtcgggatcaactcgaacggggagatcctcatcgcggacaaccacaacaacttcaacctgacgatcttcacgcaggacgggcagctgatctcggcgctcgagtcgaaggtgaagcacgcgcagtgcttcgatgtggcgctcatggacgacggcagtgtggtgctggccagcaaggactatcggctctacatatatcgctatgtccaactggcgccagtgggtatgtaaacacacagacacacacactccatggatgtgagtccggaaaggaggaggatctgtggtccggcactcactacttctataggctaagttctcaatagtctgacttgctcggtctctccagctctaattctaaatctacacaatcgaagttgaaatcgaaatctataagatccctactatctcccccgatctgtcatctctcatagccttagactttgctcgctatgtaataacacacacgcacactgttggaatgatttttattatcttttaaattattgttgaattttgttttattttttttatatatatttacactgttaagcttagtttttatttgtgcgtacttgtttatgataaatatatattatgtgtattcatgttcatgttcaaatcggatagtgccgccgcctctctatatctttgcacacttctcacttcaaaccctcgtatctctatctcgcgtgcaagtcgtattttcaacaaacacaagcaaacaaccgaaacaaacaaaaaaaatgacactttttaactatatatagtagataccagaagaaatccctccactttttttatgttcgttgccgactgcaaggaaaaaaaaggaaaaaaattatgaaaaaaagaagttggtataaaataaacttaacaaataaccgccaacaaaatggagccgcgtatcgagcattaattaattaataattgattgtaatttttagatatatgattgcgcaaattgtttgttattattatttttgattgcataaacatttgatacattatatattatatagctgttttttacgtttataaattatttttgattataccacttattgattactgattatttatatttatatacattaattaattatcctctaagacatgtttgctacttttatacgaaatcaaccgaacccaaaaccgaaccgcgacacaaacaacaattcacaatttttatactcgcttagaatttatgttttccattgttttattgtaaccacgacagcggaaagaaaagatggaattacctacctacaccgtaataataatgcagacaaaaacccactggcgattctttaatttaatttaaacaaaaacaactgaacgcactgagaatagttgaaatttttgttcttgattgttgaactattttttgtttaggcatttatattttaaaataatttcttcgttcgcaaggaagacggacgaatttgttgttttgccccaaaatatattactatattatatgcgaaaattatttgttgtcaaattgaatttaaataaacatggaaaaatgtgtatatcaaacg

SEQ ID NO: 42864 - protein, 1037 aa, DROSOPHILA
MASSPTPSLDSMRGGANSIESYEHAGYLSDSPLTLSGSSPPASDSAICSDEYTGGSSVKSRSEVTVINGHHPISASVSSSSSASSSSCSSSSSSSSSSSSSSSSTSGLSGCGSTSSSVISANNVASSNGPGVIGSNLQSSNNGGNSGISSLVVGAGKGSNSSSNSSSSNTSANGSPPRCTACKSKCSDAVAKCFECQSYLCANCVTAHEFMHCFNGHNVCLIKGFEASTTGTPLSVGSPSNNPASNEFKYASSLTMMLQQQQQLDSQQQQQQQQLLPAQPMSQLSKIVLAAAAQANSQEQQREDSIYGSLHPQQQQQQQQQQQRQLFCPRHKQELLKFSCRTCCILVCKECIVLEHSTGLHELENVQSPGMTTSTGSTANESALQTLLADMRGKIGEIVGIAGNSDQNLTKVKLQYQKAHNELNETHQFFASMLDERKTELLKELETLYTAKVNSNNSWQQRSRDLIDKGLATCEAVERSPAPPSSLLTEALLLRKSLEQQLQTGIQEMQLPFEIEFMSNYQSIQAGVRNTFGYIRANSSDGGPTGMSLTSNGHGKQPPIARPTQSASNSSASSAGSGHHGHHQQSHHHGHHNHHQTAHHQQLQAQSSLHGLGLGLSGASLLDSSSSAGGAVGAFSNGGLLLGGRDRNALAVEQHFGELMPKRGGGGYTGSNGSATSAVAHYNPYEKWSNGGSDNLFSSVTSGVSGSSAVADAFASLSAVGGSVVSGAGAGGSTVSSESLLDLTNKLLSATIYPPKSQIKRQKMIYHCKFGEFGVMEGQFTEPSGVAVNAQNDIIVADTNNHRIQIFDKEGRFKFQFGECGKRDSQLLYPNRVAVVRNSGDIIVTERSPTHQIQIYNQYGQFVRKFGATILQHPRGVTVDNKGRIIVVECKVMRVIIFDQNGNVLHKFGCSKHLEFPNGVVVNDKQEIFISDNRAHCVKVFNYEGQYLRQIGGEGITNYPIGVGINSNGEILIADNHNNFNLTIFTQDGQLISALESKVKHAQCFDVALMDDGSVVLASKDYRLYIYRYVQLAPVGM

SEQ ID NO: 42865 - DNA, 3419 bp, DROSOPHILA
agtggctcaaaaatctccatggcaaaaaggccatgacagtagtagaacttatcatccttctgggctatccttaggtcaaagtaccgcactcccagctccagttgatccagtgttccagaagattgcgtcttgctccaacggcgcacgaagcagggaaagaagcgatgccaccgcctaatcgaaatttccgcatctggcgatagttcggacttgctatttatgccataagtcatcgaattgtgggaacctatactagattgcagactcctcaattaattcagcaagtacgatgatctcatccgtacctggaatagccagattgattatcgacaggtcacgcaactcgcttggcagatccctcatccagtgatccttggacatggtgcctccttgtcctatctaatcctttctatgaagacatacaccaatgttgatgttgttgatgttggggataatccataaataatccatgggcttcacaagggggttcgtttaactgttgcgtagtatatttagtgaggctgcattgtattgcggcatttattaaataccaaacagaagcagctgattggagtccgccaaacatttacagttttaaatgaacacaaagtacagtggatactccatgactgcagtaaattagctgaaacggcattgctagaatatctttatagctgcagttaaccagttaaaactgtcccgaactgtcacataaaatttgaaaatatctaaaagtatattttggcagtaacatcttacaaaaaaattgtatatacaatgtaaactacccaaagtacctaaagttcaagcttagtatgtatttgttaaatttattatatattttgatgccacttgtttaatggatgtgatttaaactgaggtttcactgtgttgctttggaatcagctgttcagtttttcactttcccatttcgttgtttactgatatttcgtccaaagacactagtgtctttgtttcattacagctattccccctgaggatgtcgcggaagtgcgagttcctggtggtcggtggaggtattgctggcgtcagctgcgccgagtccctggccatctaccgacccaatgcctccattctactgctcacggagtccagcatcgtgaagagtgtgaccaatttggtgccggtggctcgctatctgcataagttcgacgttcgggaacaggatgtctccgaaatgggagctagttttcagacactagtggatcgcctggatcacatcaacagcagggagcattgcatccgcactaaagcgggtctggagatcaagtatcgctatttgtgcctctgcaccggtggaacacccaaattgttctccggcaaagtagtaaatccccttgtcattggcattcgggacacggactctgtacagctgctgcagcgaaagttggcgacagctaaggatgtcctgattttgggcaatggcggcattgccagtgagttggcctacgagctgaaggatgtaaatgtccactgggtggttaaagattctcacatctcggccacatttgtggatcccggagcagccgagttctttcacatagccatgaatgaatgtaatgcgaaggattcctctccggttgtggctattaagcgaatgcggtacagtgaagtgctgcccaaggagcagactaacaaccatggagctgcattgggtccggactggcatcgcagcgtcgacttgagtggagcacgtgaaggggaagagaaccgcctaccaaagatctattacaaatctcgcataagcagcgttcaggatctcgccgacgacgcaggtgctatagtcaagttggagcatgaggatgggagctttcagcagttgacctgtgactttattgtttccgcaacgggagtttggccgaataccgactacacgtgtgattcgccacttcaattttccgacgatggtggcatatcggtggatgaaatgatgcgtacgaatctggtggatgtctttgcggccggtgatgtgtgcacggccaactggccagccgcaatgcactggttccagatgcgcctgtggactcaggctcgccaaatgggctccatggcgggcaggagtatggcggctgccagtgaaggtgaaagcgtgtaccaggatttctgcttcgagctctttggccacgtaaccaaacttttcggatatcctgttgtcctgctgggacgctttaatggtcaggatttgggcagggactacgaaattctggtgcgctgcacgagaaataaggaatacatcaagtttgtgcttcaaaatggcagactacggggagcaatgctaatcggcaacactgatctcgcagagacctgcgagaacctcatcctgaacggcattgatttggagccctatggcgatgatattcttaatcccgacattgacattgaagactattttgattagtttattatgcgctagcttagagtattaaagacattaaaaataattcgcatcttggagctaactgctaggtttggcttatacctggatttggtgtggctttttttgaccgctgtcatttgagcttgccttcggtgcctgggaattattcgtttaaatggttgattacatgtagttcttaggaaatgtcgaacttttgcaatactcacccacatacttgatctcatcgaaggcctttcgtgcctttttcaactcctcgttcatggtcagaagatccttcaccctagcgtactttcggggatctttgcgcaccaggaagataatgtcttcgacttgaacacggcctgttcgaccgatctccattgcccggtgagtggtctcagctatatactcaatgaccaggtcttccagcagatctacggtttccgtgtatggatttttgtcgtctccgaatccgaacatcatgcagcgcagctccttgctgaataggcgctttcgtcctgagttggtagccacaaattggtcatcctccgcgtcgtcatcaaagttgaactaaaaatggtgattagcttagaatcggagacattggaactggtgcttataatatttccttacatcaccgccctcgaaattctcctctggcatgctatttgaggccatagtgctcagacttcaattaaaacgttgaatttgtatacaaattttgtgtttacgcgagtaacaccgcattgaatgagcattgtaatcgatacttgcagcactgctggcgataattggttgagaaggtagctgatactgagactaactcgaaatagctagattgcgagctcatatttcaaatatctgagcttgtcaacaaatctaaatattttggttcgtgattaaataaattgtgaatttattcaagaccatacaaaatacatctaaaatatatttatataggtgcttaaattatagccacgagtaaaaatctagccaaactcaacacatggttgcactgcgc

SEQ ID NO: 42866 - DNA, 1419 bp, DROSOPHILA
atgtcgcggaagtgcgagttcctggtggtcggtggaggtattgctggcgtcagctgcgccgagtccctggccatctaccgacccaatgcctccattctactgctcacggagtccagcatcgtgaagagtgtgaccaatttggtgccggtggctcgctatctgcataagttcgacgttcgggaacaggatgtctccgaaatgggagctagttttcagacactagtggatcgcctggatcacatcaacagcagggagcattgcatccgcactaaagcgggtctggagatcaagtatcgctatttgtgcctctgcaccggtggaacacccaaattgttctccggcaaagtagtaaatccccttgtcattggcattcgggacacggactctgtacagctgctgcagcgaaagttggcgacagctaaggatgtcctgattttgggcaatggcggcattgccagtgagttggcctacgagctgaaggatgtaaatgtccactgggtggttaaagattctcacatctcggccacatttgtggatcccggagcagccgagttctttcacatagccatgaatgaatgtaatgcgaaggattcctctccggttgtggctattaagcgaatgcggtacagtgaagtgctgcccaaggagcagactaacaaccatggagctgcattgggtccggactggcatcgcagcgtcgacttgagtggagcacgtgaaggggaagagaaccgcctaccaaagatctattacaaatctcgcataagcagcgttcaggatctcgccgacgacgcaggtgctatagtcaagttggagcatgaggatgggagctttcagcagttgacctgtgactttattgtttccgcaacgggagtttggccgaataccgactacacgtgtgattcgccacttcaattttccgacgatggtggcatatcggtggatgaaatgatgcgtacgaatctggtggatgtctttgcggccggtgatgtgtgcacggccaactggccagccgcaatgcactggttccagatgcgcctgtggactcaggctcgccaaatgggctccatggcgggcaggagtatggcggctgccagtgaaggtgaaagcgtgtaccaggatttctgcttcgagctctttggccacgtaaccaaacttttcggatatcctgttgtcctgctgggacgctttaatggtcaggatttgggcagggactacgaaattctggtgcgctgcacgagaaataaggaatacatcaagtttgtgcttcaaaatggcagactacggggagcaatgctaatcggcaacactgatctcgcagagacctgcgagaacctcatcctgaacggcattgatttggagccctatggcgatgatattcttaatcccgacattgacattgaagactattttgattag

SEQ ID NO: 42867 - protein, 472 aa, DROSOPHILA
MSRKCEFLVVGGGIAGVSCAESLAIYRPNASILLLTESSIVKSVTNLVPVARYLHKFDVREQDVSEMGASFQTLVDRLDHINSREHCIRTKAGLEIKYRYLCLCTGGTPKLFSGKVVNPLVIGIRDTDSVQLLQRKLATAKDVLILGNGGIASELAYELKDVNVHWVVKDSHISATFVDPGAAEFFHIAMNECNAKDSSPVVAIKRMRYSEVLPKEQTNNHGAALGPDWHRSVDLSGAREGEENRLPKIYYKSRISSVQDLADDAGAIVKLEHEDGSFQQLTCDFIVSATGVWPNTDYTCDSPLQFSDDGGISVDEMMRTNLVDVFAAGDVCTANWPAAMHWFQMRLWTQARQMGSMAGRSMAAASEGESVYQDFCFELFGHVTKLFGYPVVLLGRFNGQDLGRDYEILVRCTRNKEYIKFVLQNGRLRGAMLIGNTDLAETCENLILNGIDLEPYGDDILNPDIDIEDYFD

SEQ ID NO: 42868 - DNA, 3975 bp, DROSOPHILA
acctggatttggtgtggctttttttgaccgctgtcatttgagcttgccttcggtgcctgggaattattcgtttaaatggttgattacatgtagttcttaggaaatgtcgaacttttgcaatactcacccacatacttgatctcatcgaaggcctttcgtgcctttttcaactcctcgttcatggtcagaagatccttcaccctagcgtactttcggggatctttgcgcaccaggaagataatgtcttcgacttgaacacggcctgttcgaccgatctccattgcccggtgagtggtctcagctatatactcaatgaccaggtcttccagcagatctacggtttccgtgtatggatttttgtcgtctccgaatccgaacatcatgcagcgcagctccttgctgaataggcgctttcgtcctgagttggtagccacaaattggtcatcctccgcgtcgtcatcaaagttgaactaaaaatggtgattagcttagaatcggagacattggaactggtgcttataatatttccttacatcaccgccctcgaaattctcctctggcatgctatttgaggccatagtgctcagacttcaattaaaacgttgaatttgtatacaaattttgtgtttacgcgagtaacaccgcattgaatgagcattgtaatcgatacttgcagcactgctggcgataattggttgagaaggtagctgatactgagactaactcgaaatagctagattgcgagctcatatttcaaatatctgagcttgtcaacaaatctaaatattttggttcgtgattaaataaattgtgaatttattcaagaccatacaaaatacatctaaaatatatttatataggtgcttaaattatagccacgagtaaaaatctagccaaactcaacacatggttgcactgcgcgataacgccgcccgaacaatcgttatcgaagcctttgcttgcacacgcatttcaaaaatttttataaacgaacacatcgttcattcaaaaggggaaaatggaagtgtttacctttgagaaatcgtacttggagcgcctaaaagaagcggaggcggtgctttcgtgggagggagccgtgatgcccgcatcccaggttcgatccgagtggaaatcctacgtcgaattaaaaattgagcctgcaggtaagccacccacacacacacacacacacactcgtgcacaaaaggcaactatatatacatatatgtatctatatgggatatataggatggcaggcaatttggaaaattccacgcgttatttgcgaggatctgaaactacgctatcccaccattgtttacggctacgtggagcaggtgatctttgacgagctcaaggcggtatttgtggtgaccgccgtgcaggatagcgatgtccacctgccggagagtaatgaagtatcgctagtggagctgtggcccactgtgcagcaggagaacgcagctctaaatgtggataccaccgctgaatgcatcgatcgtttgcggttcttctatacgcatgtgtggatgccttgggacaaggactacgacgatgatcgcgactgggtgcaacagcatctgcaggctcgtatccaactagtgtgcgatctcagcaagaaccgactgccccgtccgttggccctgcacatgcgcaccctgctcgccgaagccaaatacattcagcagcgtctggactacttggaactggatctcagtgatgccgagagcgacgacgaggctgtggaactcaatgacagcgtagcagagcccgctagaaagcaatctaaagcgggcagtgccaatggctgtctcaatgtgtccagtctgccggttacagatctgatgtgcctgcacctgcgcatggccatcataaggagcgagttcgagatccttgaaaatcctgaaatgaggcgagcctacagcgagctacagtctaatagcctcaagcggcttcgctgctcctcaggaagaaccagacaatcggaggatctcttggtagagcggaattccataagccatgtggtaaccttgccgggaaaactgcagcagcagctggaactgctaaagctggcccagacgctggtcaagccggaatcgaaagtgcagctgtccaatacgttgcaggatgtcctgagcatctgtcagagcaacgatgatattctactttcgcccggcgagcatacaatcaaattcttggagcacctcaacgataatggcagcctaaggggactcactcagccggaagccatactaagtcctgctgcagatctttccctgctgcctgtggtgtgctcgagcgatgaggatagcaccctgctggtcattgatggcgactataccttgtcggaattggttttggattgtcgtcatgtccgtagagggatcctgctgcgcaacggaacgttgaccatgcgagggtgtcgcttgctgggcgatgggagctccagcacccaagagggtattgtctgcatgccaggcgccagcgtggaactcaaaagttgcctaattgaaaactttgctgtgggtgtatcgatgcgaccgaaatctagtgctgagctgggaagcgtccagtttaaaacatgcaagactggactggagttgctggagaaatccgcttcggttaatctgcagggtagcaagtgcagttttgaaaactgtgctttaggaatcctggccgatggtttcgtattgggagagcaaagaacagagaaggtcctggttctaaacaaattcagcgaacttcagcggtaaatgaaaatacgttgtattttacatgttcaaaaattaccacttatatccttattttttagttacaacgaggacaacttgctaggtaattgcagcttttacaactgcaagaaaaatgtgcgagtttttaacgaatccggtcagctgctggctcagcgatcgcatcaacaactcctcgaggacgaactcggaggggagaacaaggaaaatattcaattggtctaggggtacattgtgtacacatagtgtttataaattaaaatttagcgctaaccgaaaatcctattgatatgcgtcaataaataatacgggcaaactccagtgtctcgatgttgcaatttcgttggatgtcctattctcgaaaccttacatattggttttaactcttgataaagttagttaatatataatattacaccgtctcagagcgtcttccagaaaatacttcctttaacacataaatactccgaacaataacctgaatttgtttacagtaatttcttttaataaaaacatgttaatcattagttggttaagctttctgcttctgctcctggccgtagtactcgctgtaatcatactccctgaagggcacatcgtatgttaggtacccggagtcgcgggcttgctgaacggcgaccattagacgcaggtggctcttttgacacaggcctgtctttgagtagctaaggacgtctccgctgtggggcgatatgaactgctccaggagctccgtgttgcggtagtccagcaccaggtattcatcacggcaaatgggacagggatttccggtgctgatacggttctggcggatgcacgtctttcgtgttttgcgcggcgcatacatgcccttgtggttgcgcctaaagagattagatgcgaatgcaatggaagttttcacgtgtatgccttcagttcgtcttaccgatactgcgtccacacaaagtcctcgccgtaggtttgcttgtaagcggcgctctttaagtatcgaatcgaggtctccactgggattggtttgctgcgatccttcgggtctggtgcggaaccactagcgttatcctcgccttcgccttcggtggcagccgcattattttcttcagtcgaagtctccgccttgcatctcaaggcgctggccgtgtgaagagctccccggctattccgggtaatgttgaccagtccaatgtaaattccacgtgcaatcggcaacattttaattgaataaaac

SEQ ID NO: 42869 - DNA, 1827 bp, DROSOPHILA
ttcattcaaaaggggaaaatggaagtgtttacctttgagaaatcgtacttggagcgcctaaaagaagcggaggcggtgctttcgtgggagggagccgtgatgcccgcatcccaggttcgatccgagtggaaatcctacgtcgaattaaaaattgagcctgcaggatggcaggcaatttggaaaattccacgcgttatttgcgaggatctgaaactacgctatcccaccattgtttacggctacgtggagcaggtgatctttgacgagctcaaggcggtatttgtggtgaccgccgtgcaggatagcgatgtccacctgccggagagtaatgaagtatcgctagtggagctgtggcccactgtgcagcaggagaacgcagctctaaatgtggataccaccgctgaatgcatcgatcgtttgcggttcttctatacgcatgtgtggatgccttgggacaaggactacgacgatgatcgcgactgggtgcaacagcatctgcaggctcgtatccaactagtgtgcgatctcagcaagaaccgactgccccgtccgttggccctgcacatgcgcaccctgctcgccgaagccaaatacattcagcagcgtctggactacttggaactggatctcagtgatgccgagagcgacgacgaggctgtggaactcaatgacagcgtagcagagcccgctagaaagcaatctaaagcgggcagtgccaatggctgtctcaatgtgtccagtctgccggttacagatctgatgtgcctgcacctgcgcatggccatcataaggagcgagttcgagatccttgaaaatcctgaaatgaggcgagcctacagcgagctacagtctaatagcctcaagcggcttcgctgctcctcaggaagaaccagacaatcggaggatctcttggtagagcggaattccataagccatgtggtaaccttgccgggaaaactgcagcagcagctggaactgctaaagctggcccagacgctggtcaagccggaatcgaaagtgcagctgtccaatacgttgcaggatgtcctgagcatctgtcagagcaacgatgatattctactttcgcccggcgagcatacaatcaaattcttggagcacctcaacgataatggcagcctaaggggactcactcagccggaagccatactaagtcctgctgcagatctttccctgctgcctgtggtgtgctcgagcgatgaggatagcaccctgctggtcattgatggcgactataccttgtcggaattggttttggattgtcgtcatgtccgtagagggatcctgctgcgcaacggaacgttgaccatgcgagggtgtcgcttgctgggcgatgggagctccagcacccaagagggtattgtctgcatgccaggcgccagcgtggaactcaaaagttgcctaattgaaaactttgctgtgggtgtatcgatgcgaccgaaatctagtgctgagctgggaagcgtccagtttaaaacatgcaagactggactggagttgctggagaaatccgcttcggttaatctgcagggtagcaagtgcagttttgaaaactgtgctttaggaatcctggccgatggtttcgtattgggagagcaaagaacagagaaggtcctggttctaaacaaattcagcgaacttcagcgttacaacgaggacaacttgctaggtaattgcagcttttacaactgcaagaaaaatgtgcgagtttttaacgaatccggtcagctgctggctcagcgatcgcatcaacaactcctcgaggacgaactcggaggggagaacaaggaaaatattcaattggtctag

SEQ ID NO: 42870 - protein, 602 aa, DROSOPHILA
MEVFTFEKSYLERLKEAEAVLSWEGAVMPASQVRSEWKSYVELKIEPAGWQAIWKIPRVICEDLKLRYPTIVYGYVEQVIFDELKAVFVVTAVQDSDVHLPESNEVSLVELWPTVQQENAALNVDTTAECIDRLRFFYTHVWMPWDKDYDDDRDWVQQHLQARIQLVCDLSKNRLPRPLALHMRTLLAEAKYIQQRLDYLELDLSDAESDDEAVELNDSVAEPARKQSKAGSANGCLNVSSLPVTDLMCLHLRMAIIRSEFEILENPEMRRAYSELQSNSLKRLRCSSGRTRQSEDLLVERNSISHVVTLPGKLQQQLELLKLAQTLVKPESKVQLSNTLQDVLSICQSNDDILLSPGEHTIKFLEHLNDNGSLRGLTQPEAILSPAADLSLLPVVCSSDEDSTLLVIDGDYTLSELVLDCRHVRRGILLRNGTLTMRGCRLLGDGSSSTQEGIVCMPGASVELKSCLIENFAVGVSMRPKSSAELGSVQFKTCKTGLELLEKSASVNLQGSKCSFENCALGILADGFVLGEQRTEKVLVLNKFSELQRYNEDNLLGNCSFYNCKKNVRVFNESGQLLAQRSHQQLLEDELGGENKENIQLV

SEQ ID NO: 42871 - DNA, 5806 bp, DROSOPHILA
agttccgccggctatcgagtggcagagcacgaatccctccagcgaatcgctgccatcggcctcgcggtccagaatgtcgaacacctcctcctgcaccttctcaccctggctaaagccggacgcccagttgtttcctgctccaccgccgtgcttggagaggaacacattctcctggttgtacaactgcaaaggggaaacacatatccatctacatagttttttaaatgaaatacataaaataaagtagattagatcagaatccgatccaataagaccagtttccgcactgaccttggagtacggagaggtcatgatgttgttaatgactctgggctctaagtctatgagaacggcccgcggtatgtaatggttgtcgtccgcctggtaaaagaacacatccttgcgatcctgtccatcggtggcgaagtcttccaggacgccatccggggagatgccgtgctccaggcacaatctcttccagaactcgaaaccaactgcggaatggagtgatctcgatcaagccggagcttctcttaacttcgatttcgacgtgaagaacttactttgattgccacattggcccaattgaagggttataatctcgctgggcattttgctcgaattgcagtttagttaatttcgcttctttctcagtaaataataactgtgcatcgaaggccaactggagatggaagtggaagtcattaatatcgatatacaagaagtacaatacaacagtaagttattacctatttttctttactaatctttatgatttatttaatgttattggacttatagaaaatacttagaattaagatttgatccattttttttttaaatatttaggttcaaataaattagccatagttatatattttttatgttttcatttacataaaacattaactgttatttttttaaatttaaaggactagctttttcaattgtacagcacaccctgtggctgcgagtaacggttctcgggagtcgttattttctgagaagcgcgcaacgtgcacactggcaggctgattgaaaaaattcgttgcaaatgtttatgtacaaatattgaataaaaaataaaaatgctgcggcaggagaacttggcagccaacttctgcggtctcctggccagccagggctataaaggtgagttcgtatttcgccaatttactccgagcctcatggatgtccgtaaaaatcgcagagaaggcaaacgagtggcgcattttgggccaggaacaggatggatctctgctcacgtcctggatattcgagtacgcggacgaggatcagcgcaaggagacgtgcattggccactttcacgccaccaagaagcagctgcgactcctttggaccctcgacaattgccgtgagatcgtccaggcaacgattaacagcagtgtcacattgctgtccttcgtggagaaaactgagggcaagctctatcaggcctttgtcgtggaggtaaggagctccgaaggtggcacggccacgcccctcaactcggagccctccaaccgccagatgatgacgcagttcctgtggcgcgtcgagagtgccacgcgcacctgctggcaggacaagctactggtgctcacccacgaggaatgtaggtgtcatgtatatgtcattatccacctctaactcccatgctcgtacctgttttttctagccatcaagcagtacagctgcgtggtcaagcagagctccaccacatgctcgactggcggaggcgagggcagcgcctggaggctagacaccagcatactgacctacgaaacgctggccaggaactttagctgggcccagtgggatcccgagtgccaggctctttattacattcacttgaagccgaaggccaagagcctcagtctgctggacgagagggaggaggctggcgagcagacaactcctactttaagccccacgctctccgcctttcagtttaacgaaaaacagccaacggaaacagtggtaggtacttaaagattaaagtattacgtataggtgtagttacatctttctattgcagcttaatatacccctcaatttgccaaagctgcccaatggctccaaagaggaatcgccaagctacgatgacgatgcggttcccttgcgcgtgcacgatagttcgctaaatctcatcatactggcggacacctcgggcatgtttttcgtctgtcactactacctgtaccagccgatgcagtcggagcaaagggatgtgcactttgcctactcggtgactttgcttcaccacggctatgtggtgcactgcgtcatgcccggtgtgccgtggcaaaaggcccgtctgctgaggccaacatttgcgctacacggccagcatcacttgctggtgtcgtccgccttttttgtccacctcttggacgtgggactgcagcacgaaccgaactgccatatcgtgtgtgcagcccacaatcgaagtcccgatatcacacagctggtgcctttgcgaaagtggggagctctggcttatgatgcggccaccttggatctggtctcgttgtccgtgcccaaatcccatttgatagaggctttccgcaatgacagttcgctggacaatagaatcagcattatccactacttccttttgcactcgaacgatatggatgtgttggccgagctgctgaacaatatcttggagcgaccactctccctggatacggtggctttgctgaaggaggctcttgtggctggcagctatgcggctgctgttcgcggactaccagaggatgccaagccactgatgcgactactgccattgactactgccttagcctcgcgaccaatccacgcaaaggtggccgatataagcgtgggtctctctcatgaaaccctgcacaataccagcatgatgctgctctcgccacagcagcgcctttcaccttatcgcacggacatctggactcgcttatgggaccttctcaacgagtcagccaagcaggagcagcctagattcagtgctgagcaggtgacggagaagttgatctttagtttggcctgctaccagccggaggctctgtccagatgcaccacgccactttcgccagacacgggcaccggtggatttggtgactatagtagcggaagtgcttttccattcagcaacgaagtgctgccctttatcgaactggagggatgcacagccagcaagcaggagcacgtcatttctgtggtgagttgctgcgtaatcttgaggtaacatttttattaaagctacgaaatttacagtatctgcgcgagctgagcgttcacctggtgaagcacacgtcaaagcccaacactggcttccgctggctgaaggagacctttttcgagcgctcccaggctccagctcatgtgcatgcggtggcctcccagttcgtttccgcgcagcttgaactctcgcgggctctttgctctctggtttgtcgtgctgcaggcctagatgcgcgcatggagacctcgaggggttttcagttgatgtgagttggtgatgatttcaaatgtgatcacttttcactcacgtctgtaatgattgcagtgaccaaatggctgccaatcaacagcactctctgtttctaatcctcgagcgctattgcctggctgtggaatcgattgcgtttcccctgcccgagggtttctcctcgttcttcacctacttgggctatcgtgcgctgggctatgatatgtttctgcagtatgtggaaaatcatgtgttcgaactgcaagtggatgtgatgaaggccattgttttcggtttgtaacaaatatatatacttgttttcatatactgttcatttcattattgcttaatgtattccttcagatattgaagattctccactgggcattgagcggaagctatcacttttgtctgctctgcccaagcagcgtgctcaaaggttactcaaatgctggcagcatccggacagccttatgatccgcggacgcgagcatgcggccaacattctgtcgggtcagcagcaggaggtgttgcaccagcagcgacccacggcctgcgtgaatcaatcgcgaaataatgcgcggagcggtaagatcttgcttggttagcccgccataaacacgttaacttttcatttgtacactcttcacccgaacacatctcgtccagctttgggcaagcccaacactgttgtttgtcactcgctgcttttggtttttctgcttttcattctaaccacggtcgtcctgagcatatcgagctatgcgttcaggcagcgccctctcatctggtagaaaacattcccatcgctgaccggtaagaaacgctgttcagtgttcgccagtcgttgtcccatttgcacattttgtttcttgttatctaacttaaccatagccacctctctaatgaccaatttggttggtattcttgcagatctaactgccgaagccctttcgccactggactcctttctggacctgctgactgcgaaggccagtctaaacgaattggactacaatctgcttattgaaactactctaagctccatcgatcagctgaaactggaggcttgaatttaatgttaagagtaactaatgaagtattgtgtcaaattatcaagtacttagccaaggccagtttgcaaatattccaaagatttgatttgtcaaatgtattagttaagattcttctcgtgcagctttgatttttgttagggttcttctgtgtgcttttagtattaattttctgttcctattatttgtgtaacgactgatacacattccaagtctgtaattataaattatttatgttgttaattgatgtacctaaaatcatgtacgtatttatatattctgtacttatttattttatgcttctgcaagcttctgtctctctttctgtaataaactaacgatttataaagtataaaatgtcgtaatgtttatttttggcaacatgagtttaattcgaaattgaatcaaacacaataaaaaaaagttaaaaggttaaaatcattatattacatcattaattcgaattcatttgggaagtttgtgggtctattttttaaactttatatgaatgtttgtttagttaatttaataaaggatatcgaacagtatgccagttttggtatttagccaattggagatgttcgatgagatgttcgaactgcaaccgagttcgaggttccaacacgactgttatacgggttccagccttcaagttctacagaacaagtccacgagcgccacacacagtccacagtccacactccactccgctcggcgtggaagccattcgcttcgtggcgaagtgtttgtttatccagttgacagtttgtggaaaatcgtcacggtgagcggatcaaacgcggaaaacgaacgcggacgaacggcgagaaaagcgaggaaaaacgggtgcagagacagagactgattgggaaatatgtgcgcctgagttttcccggccagaaggcaaagtgccaaatgctctgacaaataattcctgtaataatcagcgcgattgaaatcaacgcgacgctcgtaaaattgcaaatgcagcgcaaaaagtgaacagcagtgcagcggaaattaaatcgttttagcgagtgccaaacgggaaatagaaaatcggcagagtagccgaactgcagttaaaactatctcttcctcttattgcgactaaacaaccggcggattaatcgaatccgaaagatggcccccaacttgctaacaatcggattacttttgaccctgatcgccagcggtcaggcccatctcaatattttcctcaacttgcacgaggtgctgcgcctaatcggtaagtaatcgt

SEQ ID NO: 42872 - DNA, 3097 bp, DROSOPHILA
ctgagaagcgcgcaacgtgcacactggcaggctgattgaaaaaattcgttgcaaatgtttatgtacaaatattgaataaaaaataaaaatgctgcggcaggagaacttggcagccaacttctgcggtctcctggccagccagggctataaagagaaggcaaacgagtggcgcattttgggccaggaacaggatggatctctgctcacgtcctggatattcgagtacgcggacgaggatcagcgcaaggagacgtgcattggccactttcacgccaccaagaagcagctgcgactcctttggaccctcgacaattgccgtgagatcgtccaggcaacgattaacagcagtgtcacattgctgtccttcgtggagaaaactgagggcaagctctatcaggcctttgtcgtggaggtaaggagctccgaaggtggcacggccacgcccctcaactcggagccctccaaccgccagatgatgacgcagttcctgtggcgcgtcgagagtgccacgcgcacctgctggcaggacaagctactggtgctcacccacgaggaatccatcaagcagtacagctgcgtggtcaagcagagctccaccacatgctcgactggcggaggcgagggcagcgcctggaggctagacaccagcatactgacctacgaaacgctggccaggaactttagctgggcccagtgggatcccgagtgccaggctctttattacattcacttgaagccgaaggccaagagcctcagtctgctggacgagagggaggaggctggcgagcagacaactcctactttaagccccacgctctccgcctttcagtttaacgaaaaacagccaacggaaacagtgcttaatatacccctcaatttgccaaagctgcccaatggctccaaagaggaatcgccaagctacgatgacgatgcggttcccttgcgcgtgcacgatagttcgctaaatctcatcatactggcggacacctcgggcatgtttttcgtctgtcactactacctgtaccagccgatgcagtcggagcaaagggatgtgcactttgcctactcggtgactttgcttcaccacggctatgtggtgcactgcgtcatgcccggtgtgccgtggcaaaaggcccgtctgctgaggccaacatttgcgctacacggccagcatcacttgctggtgtcgtccgccttttttgtccacctcttggacgtgggactgcagcacgaaccgaactgccatatcgtgtgtgcagcccacaatcgaagtcccgatatcacacagctggtgcctttgcgaaagtggggagctctggcttatgatgcggccaccttggatctggtctcgttgtccgtgcccaaatcccatttgatagaggctttccgcaatgacagttcgctggacaatagaatcagcattatccactacttccttttgcactcgaacgatatggatgtgttggccgagctgctgaacaatatcttggagcgaccactctccctggatacggtggctttgctgaaggaggctcttgtggctggcagctatgcggctgctgttcgcggactaccagaggatgccaagccactgatgcgactactgccattgactactgccttagcctcgcgaccaatccacgcaaaggtggccgatataagcgtgggtctctctcatgaaaccctgcacaataccagcatgatgctgctctcgccacagcagcgcctttcaccttatcgcacggacatctggactcgcttatgggaccttctcaacgagtcagccaagcaggagcagcctagattcagtgctgagcaggtgacggagaagttgatctttagtttggcctgctaccagccggaggctctgtccagatgcaccacgccactttcgccagacacgggcaccggtggatttggtgactatagtagcggaagtgcttttccattcagcaacgaagtgctgccctttatcgaactggagggatgcacagccagcaagcaggagcacgtcatttctgtgtatctgcgcgagctgagcgttcacctggtgaagcacacgtcaaagcccaacactggcttccgctggctgaaggagacctttttcgagcgctcccaggctccagctcatgtgcatgcggtggcctcccagttcgtttccgcgcagcttgaactctcgcgggctctttgctctctggtttgtcgtgctgcaggcctagatgcgcgcatggagacctcgaggggttttcagttgattgaccaaatggctgccaatcaacagcactctctgtttctaatcctcgagcgctattgcctggctgtggaatcgattgcgtttcccctgcccgagggtttctcctcgttcttcacctacttgggctatcgtgcgctgggctatgatatgtttctgcagtatgtggaaaatcatgtgttcgaactgcaagtggatgtgatgaaggccattgttttcgatattgaagattctccactgggcattgagcggaagctatcacttttgtctgctctgcccaagcagcgtgctcaaaggttactcaaatgctggcagcatccggacagccttatgatccgcggacgcgagcatgcggccaacattctgtcgggtcagcagcaggaggtgttgcaccagcagcgacccacggcctgcgtgaatcaatcgcgaaataatgcgcggagcgatctaactgccgaagccctttcgccactggactcctttctggacctgctgactgcgaaggccagtctaaacgaattggactacaatctgcttattgaaactactctaagctccatcgatcagctgaaactggaggcttgaatttaatgttaagagtaactaatgaagtattgtgtcaaattatcaagtacttagccaaggccagtttgcaaatattccaaagatttgatttgtcaaatgtattagttaagattcttctcgtgcagctttgatttttgttagggttcttctgtgtgcttttagtattaattttctgttcctattatttgtgtaacgactgatacacattccaagtctgtaattataaattatttatgttgttaattgatgtacctaaaatca

SEQ ID NO: 42873 - protein, 915 aa, DROSOPHILA [sequence omitted]

SEQ ID NO: 42874 - DNA, 3570 bp, DROSOPHILA
ggggttcggtagagttagtattcctaatttactaaaaaaaaagcaacggcaatcaataggcaagtgctttctagttcaagaaggatatttcttttatatggcaaattagattaatcttaatgtgtgcgacggatttgttaccattaacattggtcttcactcttcttgttcttatcaagttcgtaatctccagagatagtttatctcgaggtgtaaatggcacattagtttactttcaataacaatattatgaacctattttaagcgcaaatgagactttgttgttacacgttcaccgcccacatatcgtgtttgaacccatttgtgagcgagcagtggcccatcaactataaagaaccgaataacaaagaaacaaataagctgctaaaaatataatcctaatataagcccatcgcgtttatcaacctacccaaaaaaaaaaggagctagatagccttcacaacaatttaaataccaatttgcctaattaaggcaactctagaccgcgcctccgcccgtgacaactcaactcaacttagcttctggtggtccccgcagaccaggcgtaagtccaaaatattgcgtgaccagtcgtttgggtgctaaaaggggtggggattcggtgcagctggaggtaatgacatcaacgaacgtcgcaacatgctgggatccctgaccagaggtcatcggttggagctacgcgacggtgtgtcccttggttgcgctccagccaaggcggtttggtttcgaaaacattttaatgatttaaatatatagatatacaatatatatttgatgcccacgtggctggcctcgcagtcatcaattatgtaggggcgacgaattgatccagatgccattattcacaggcaatcaaatcctgtggcctgacattgaattcagccattgcattgaattcaatcagtcaggaacggtcatcaaggcctcccagttgttttctccgctcgactcctgttctaaactccttcatccgcagacgatggcggccaagagcgatatggatattctggccaactccatgtacgaggacgatcccaatggcaacctagcgcccgccaccaccaaggataaggaatcagtcaagccggaggagctgaaggtcacccccgctggcaccaaagcaacatccccccccaactcggcgaccttagtttcgacttctccgcgatggggtccgcagaataagggcgcccaggaactagccttgttgtacagtccaggtgagcagttcccacggattataagctgttatgagaaagttaccagaaggtgaactagaaagtttcttgtccgataattacaaaagaagcaaactgctttaagataatgtccgattatatatcaatcaaatacttgccttgaatgtcctatacaacatatatgtatgtacataaagagcgcacttgtatattattacttgtatatctcacgtcttttgcctaagcagtgggtatacgatagcgaggcaatcatatatattggcttctgcaaaaagtatacaacagtctgtacgttaagagtgcaatctctgaaatctcagtttgcatatttccatgtcgctctcttgctgctttacctcagcaatgggtatatgacagtcgagacactagattacattagaaaatcctggggttttattttatttaaaattttatttaaacaggaaaacgtgcccaggaaatcatttgcgtctacacctgcattggccttatgatcattaacctagccctgattgttagacacttgcgattggagcggattagtgtcgcctttctgtccgccctgtgcggcattataacggccgactttgcttccggcttggttcactgggcggcagacacctggggatcggtggacataccgatgattggaaaggtaagccaaatgtacatcgagaatctaatgtgataaatgatacaagacatatattttgaactcttctagaacttcctgcgaccctttcgcgagcatcatctggatcccacatccataacgcgacacgatttcattgagacaaatggcgacaactttatggttggcataccaattctcggctacttggcccactatttttacatcaggacgcccagcgagatacagcaacacttcggctggatagcctatgtgttcctctgctccatattcgtggccatgaccaatcaggtatatcgaaatgttttcccacggctgcttaaactaacttaaaacgtatcctaatactcgaaagatacacaagtggtcgcatacctattggggattgccgaggtgggtcctgttactccagagctgtcacatcatcctgccacgcaagcatcatcgcatccatcacgtggcgccacatgagacctacttttgcatcaccaccgggtggcttaactggccactggaacgcatcaggtatggccctctagcaaattgactctaacggttataatatgtatgctatgtattcgattagattctggtcaacattcgagctcatcatcgagcattttacgggcctcaagccccgcgatgacgacctgaagtgggccaagaaactcacatagtttcactgcccagcgactgtatataggtaacttggaccaaaagcagcctttaattgctgaatatgtcacctttaaatgttttcatacaatcggaatgtcttacagaatgaagtagctttaaatgagacaagattgcatacataaggtttatatggttaatggcatagttctcagttgcatgtttgttaaaaatagttgattatctgagtttaagttcgtgtttttaaataccatattactattgtacacctgcacacactctcacaactgagcgcataaactaattgatctcgccacaggttgatcgtactacgagtgagccttaagtatacctaaataataaaatgaacattttactaactatcgagcacacgcttgtctgataaattttttaagatttacacacaataataatactcgatataacatatgtaagctaggcgagtaactgattttgaaccaggtccgagacaaaaagacattttaatactgtcaacaaacgctggttatcaaaggctataaagtgaataaatttatttacaactacatacatatacattcaaaagataattaaataaggcgctgtatgcaatcaaatacgtgacttaacctttgccttaaaacgtttttatagtataaactcttctggagaagcgaattctgttttagttggcacacttttagtggcgagtgttagtcattgtaagagaccagtttgtatattttactttttcattgtttttaatttcatttacaagaattaagagtaatcggcgaaccgaagaggtgttcttgcacaacgctgtaattctaagaaggcaatattctttgtgatctgagaaaataaatcaataagcttaaaatcttttatttatgcataaagcttgccattaaaggggcacatacaaatatttgtaaaataaaaggcatcacgttttggtagccttgtttacgttcctttggagcttatctctcttcttttgggcatctctctcccggg

SEQ ID NO: 42875 - DNA, 933 bp, DROSOPHILA
atggcggccaagagcgatatggatattctggccaactccatgtacgaggacgatcccaatggcaacctagcgcccgccaccaccaaggataaggaatcagtcaagccggaggagctgaaggtcacccccgctggcaccaaagcaacatccccccccaactcggcgaccttagtttcgacttctccgcgatggggtccgcagaataagggcgcccaggaactagccttgttgtacagtccaggaaaacgtgcccaggaaatcatttgcgtctacacctgcattggccttatgatcattaacctagccctgattgttagacacttgcgattggagcggattagtgtcgcctttctgtccgccctgtgcggcattataacggccgactttgcttccggcttggttcactgggcggcagacacctggggatcggtggacataccgatgattggaaagaacttcctgcgaccctttcgcgagcatcatctggatcccacatccataacgcgacacgatttcattgagacaaatggcgacaactttatggttggcataccaattctcggctacttggcccactatttttacatcaggacgcccagcgagatacagcaacacttcggctggatagcctatgtgttcctctgctccatattcgtggccatgaccaatcagatacacaagtggtcgcatacctattggggattgccgaggtgggtcctgttactccagagctgtcacatcatcctgccacgcaagcatcatcgcatccatcacgtggcgccacatgagacctacttttgcatcaccaccgggtggcttaactggccactggaacgcatcagattctggtcaacattcgagctcatcatcgagcattttacgggcctcaagccccgcgatgacgacctgaagtgggccaagaaactcacatag

SEQ ID NO: 42876 - protein, 310 aa, DROSOPHILA
MAAKSDMDILANSMYEDDPNGNLAPATTKDKESVKPEELKVTPAGTKATSPPNSATLVSTSPRWGPQNKGAQELALLYSPGKRAQEIICVYTCIGLMIINLALIVRHLRLERISVAFLSALCGIITADFASGLVHWAADTWGSVDIPMIGKNFLRPFREHHLDPTSITRHDFIETNGDNFMVGIPILGYLAHYFYIRTPSEIQQHFGWIAYVFLCSIFVAMTNQIHKWSHTYWGLPRWVLLLQSCHIILPRKHHRIHHVAPHETYFCITTGWLNWPLERIRFWSTFELIIEHFTGLKPRDDDLKWAKKLT

SEQ ID NO: 42877 - DNA, 3272 bp, DROSOPHILA
ctttcaatttcagcaccttcagttaccagagaacctgtacgaggtacgtgctgtgctactacggaaaacccgttctacggcaatgccaggatggccttcaatacaactctgccacagatcgctgtgatttcccccaaaatgtcgattgcgtggagtccgagtgctccatctactccaatgcgtatcatttgcgctatgttcccagcaaggtttcctgccagaagtacttcatctgcggcaacggaattcccagggagcaaacctgcactgctggcctccactttagtaccaaatgcgattgctgcgatattccatctaagtcggactgtcaggtgggttaagaacaacagtacactcctaagggaaatagttgcataacccttttattttttagatcccagcagtggaaagaaaagtgcagcaactttcacgactttcacccgttactactgtaggaatctgccccccatccggggtccatttctatgtccatgagtctcgacgagatgcctattactattgcgtggatggacatggtctggttctggattgttcggcgggtctttggtacgaccccacggttcaggagtgtcgtgaaccccagaatgtgggcatgtaacatggttgatctgaataaaaattgtttttgtgacaaaagtactaaagatgtttcgatttttaaatgattaagctaattcgttgaaaatttatttaatatttatttattacttagtccacttcaactaaagttttatgtccgaatagtatgattttaaaataaagtggttatttgaatatgtattcaaatagctttttaacgtaaatttcccttgcaacaagttcaatcaatcaattggtaggtttaagatgattgtaaaaaataagtggatgccttatttaagacccattaacataatctgtcaagcttttcttttcatagtacgagtattataaaggcattcgtttgtttgaaatcgtattggatctttatttcgagtaactagaagcccacgaggtgtggttcacggcactcctcgcgcttggcatcgaacaccaggccgggtgtgcagtccaaggtgactccacgtccattcaggcagtagtagtacgcatcctgacgcttctggtgggcaataaagtgggcgccctccgatggacactcaatgtcggcgagacgtggcggagctcgggcaaagggcaggatattccgttgaaggctctccacctgaatgaaatgaataggtttttatgtggctcccagaaaacttcagataaaaaaaaacacgcaccgtgcagttgactttcgaggggaaatcgcagctctgagtgcttggattgtactgcaggccacttgtgcagttctggacttgaggaagaccatccatgcaaatgtagtacttgtcacagcgagccttgctgggtatgaaaacgatgtcatccggattattattccggctgcacagattgtccacgcagtcgacatactgcggatagtcacagcgatcggtcagggcgttgtactgcagtccatcggagcactgacggatcaccggagtgccgtcgaagcagagaacgtacttggtgcacgtgcgatcgtaacagaacgatgacaaaccacggttcttacaggatccaatacactcgacctccatcaggggaacacactcctgatccctcgcatcgaagtagtagtccgtggggcattcacggggtacagctatctcatctgggatagaaacatgataatgcggtgaactagatatccacaggtgctggtgacttactcatgcacaggaagtacttgctacagttgcccacctggggaacaaagagattgttgaccacattggagcagacattgacatcgccatcagcagcgctacagcttccaagcagggcaaccagtgccaaaagggtcaggcgacttatcactttggaaaataaaccaagttagatcatttcggttccatagctgcaattcatactcactattcaaggttggtttcctgcggttactatcgtcttacctcgaaaaacccctccatttataggcaaactcacttgccattcaatctgcgatttgttttgattccgtgcaaatttccaatcttatcggatgtggatgcatgtttccatgtggtaattggattgttcttcctcattcaaattcgtctggcggagataagttcggtgaacaagagccaatattcaggaacatacacctctgtcagccattaggaaacacgtgtattgatgagtcacagttgatcatcgaaccacggatcgctcaagatccgatgtaattgttacaagtgtttggaatatttggataggaagccccattactttgaagatctagaaattattaagttgtagtttaggtttaagattttcttcaagatatatgtatgtatatttgttgtacaggaaggaaatgctcctagttaatccaaatagaatgtattattctataaaattattttttattttatttatttttcttttcatatcttaatcgctagcgcagtaatactttgaatgtttaaaccactcgtgcactaaagtgataaaaaaaaaaaccacacgtgcaaggaaattaaaacacttttcatcgatatccacgggttctgggaaccagtctatttaaaacatttcgactatgactattatcgccaagtttggtggtgacaaattgaaagtcgaaatgtttgcagaaataatggcgtagttttcctctagaggagtcgtgtgccgaaataacctggttgataagtgtaaattggcaaaaactcattaggcgatgaaagagagtcgatataaaatgaatatttcctggcctgatagcaaacagttgtggcacacagttcaaactatccaggagtaagttgctcatgcgatgggattccctatagttcatttacctaataaatcgtaatttcccaagtgaagtggctattaaatgggctcctactactattcatcattttgatggttcatcggaaccgggccgatgaagatcttgtagtagctcccggtccagacgacgatggtgagggcctaaatgttcaggataaggatatttacgatatgtacgaaaacacccagataaatgtctgcggcaatgtggcggatggcgtttatttgccctatgttggaaattgctccaaatatatcgagtgtgaaagtgagttatatacactaaaacatcacataagtttttaaagcaaatgaaaaatatttttaatacattaaactatccatgtatttaagac

SEQ ID NO: 42878 - DNA, 819 bp, DROSOPHILA
atgatcaacttgataagtcgcctgacccttttggcactggttgccctgcttggaagctgtagcgctgctgatggcgatgtcaatgtctgctccaatgtggtcaacaatctctttgttccccaggtgggcaactgtagcaagtacttcctgtgcatgaatgagatagctgtaccccgtgaatgccccacggactactacttcgatgcgagggatcaggagtgtgttcccctgatggaggtcgagtgtattggatcctgtaagaaccgtggtttgtcatcgttctgttacgatcgcacgtgcaccaagtacgttctctgcttcgacggcactccggtgatccgtcagtgctccgatggactgcagtacaacgccctgaccgatcgctgtgactatccgcagtatgtcgactgcgtggacaatctgtgcagccggaataataatccggatgacatcgttttcatacccagcaaggctcgctgtgacaagtactacatttgcatggatggtcttcctcaagtccagaactgcacaagtggcctgcagtacaatccaagcactcagagctgcgatttcccctcgaaagtcaactgcacggtggagagccttcaacggaatatcctgccctttgcccgagctccgccacgtctcgccgacattgagtgtccatcggagggcgcccactttattgcccaccagaagcgtcaggatgcgtactactactgcctgaatggacgtggagtcaccttggactgcacacccggcctggtgttcgatgccaagcgcgaggagtgccgtgaaccacacctcgtgggcttctag

SEQ ID NO: 42879 - protein, 272 aa, DROSOPHILA
MINLISRLTLLALVALLGSCSAADGDVNVCSNVVNNLFVPQVGNCSKYFLCMNEIAVPRECPTDYYFDARDQECVPLMEVECIGSCKNRGLSSFCYDRTCTKYVLCFDGTPVIRQCSDGLQYNALTDRCDYPQYVDCVDNLCSRNNNPDDIVFIPSKARCDKYYICMDGLPQVQNCTSGLQYNPSTQSCDFPSKVNCTVESLQRNILPFARAPPRLADIECPSEGAHFIAHQKRQDAYYYCLNGRGVTLDCTPGLVFDAKREECREPHLVGF

SEQ ID NO: 42880 - DNA, 4723 bp, DROSOPHILA
ccagaaatttcacagattttttgtttagttttattactttcagccaaaaacttaaaaatagtttaagtttaaggcaaacatggaaatctcatcgaaattatccttttgtaaccgtcaatttgaacatatgcagattagaatcaacttttaagttgacaactttgttcagtgtcattcgctaatgtcaaaagttttgcgaaacgttttcgaatgatctggttgttgatgttttcgtttttgtttttttctcgcatatgtacagagtgtaatcggtagacgccaacgttaacgttacttagtatacttcgcaaatatttatgcaaataatatgcaattacacacacacgcaaacggcgcctaaaagcgctctgtaaacaccgaagttttccaacaaacacaaacacaccagcagccaacacacacacacacacacacacacacatgtgtgccccacaaacacagatgcagaaggaaaatcctcttcaggaggcgacaaaaaccacttgcaactaaaaacgccttaggatttccattccttttttctccattctacactgtaaacagttatatccgccggaaaagcttcaaatcgcgaattcttcagtggtaaacaagcaacattttaccatataaattaaacaattttttacccatttttttatttattttttggttttaaaatacctgttactcggcagatgttaaaaatattaaaataatcgaggtttcttattaaaattgttctcgaaatcatttctgtcagtgtgcaccaacacaagtatgcaaatgaaagagcaacagaaacgaaaaacaatgttaactactttcccttctgtctgagccgccagcagaatataaacagccaaaactaatgcgaaagttttaattcttttctgcggcgtttaaattacagatttttttgatgccgttttgccataaatacgtgtttaccaattgagaaaatttcaccagtttattataccccattaaaacagcgaaattttcttagatatttcctaatttattgtttactaactagtgtttaaatcagaacaatgcttcgtttgtgtataaaattcgactggggtgaggatatctgtttcagaatactgatacgaattgggagttaaaaatagaggtaagagattaaggagtagccgtgaaaataaattgtaacagcatttaagggcaactagaactatgaattgaaaaataattaaagaaattcaatccaacacctggcgaatttgaaagtcctccaagtcctcctgcggaattagccgcagtttcaaatcgttggccaaatgcagaaccgcatagaatgccaccgacggggacagcgagtctgacattttggtggtcaaaaggtcgggcagcttctgatacacctgctgaaaactcgcgaaaccctttgaatagtgttcgccctttttcttgggatgcgagggtatcgtctcctccggcacagcgtttagcaattgtttctgtattagagagttgcaggactttttcagattcttcatgtctataaccttggctctcttcgcgaatggaacaatcactttggcaacctgcaagtaaattattttatatggtttttagaataccaggtatgtatatatgattttatagtgaagactcacctgcgacggcgcaccctcgaactcggtgccgatctcgaagactgtgttgttgcaagtggcgttcatctgggtgaggccaatctcacccgcggacacgttcatcatgcttgcctcggccgcttgctccgcagcaatcgcggcaataacgctcacgttggcgggaacggcgtcggtaaaatgctcgttgttgaatagctcctggtcattgtcatcatcgtggtgcatatccgcatccatatcgatgccaagatctccaccctcatccgaatcaggttcacctgcgcgtttcgacaactttatgctgggagcggattcgtacttgaagaaaagatccgggtccaattcgaacttggtgggcaatatcagctttcggggatcccacttcttttggaaattcgccttgcgctgccttatggtggtgtccagctgttggaagaagttttccgtcacattgccatagtccaaagccttggctcttcggttggcattcagatgcgctgacttcttcgctcgttgagtgcgaataggctgagtgtccacctgtccattggtctgcgagaaagtgctgcgcgggcgagtccgcttaaacttccaatgcgaggggccggcccaaaactgggagatctggtccatcggcctgtaggagtactctagcttggaattcccgtctaccggtcgcaaatcctcgatgaactctgtctgcttacgtagccgacggcaattattgatcaccatttgctcctcggcagtgagctcttccagctcattggagtccacctccagcaccagaggcggtggtccatccaggtccggcatgggctcacactcggcattgatgtcaaaggccatggaaatctcatttacacacatatcgtcggcattatccagaccctcgtcatgatcttcatcctgcactacctcggcggccttttcatttgccgacttgggattgggagcacttgtgatgatgtagcccgtatgcagcggtcgcagatttgacctttcagcatgtggcagcagtttgcgcataagattggtgctcataagtgatgtggctggccattgttccatttctgcattgagtgtagtgtggtcctggacctcctcggtggactcttcgctgttccaaaaattgtaggtggtacgcaagcgcaattcagagtcgaaactaggaagaatgttgtgcatcagacgattggaagcatttatagagcccacagtggagttcagcttgccaaacacaggatcctgcaagggagccgtatccagccggctgttcagcgtttctctgtttttggtcacggtggatatgggtttcttttgccgtttgggcttcggtgctgcttcttttgctgcctgttgcgctgagtcctgaccctcgccagtagcctgttcaccttgggggccatcatcatcctcggcagcatttatttgcttatccgtaagagttcgtgcactcaagccagctgaaatgcgcatggcgtccaagtagatggagtccacacgcaggccgtaaaccttggaagaggcttctaaagaggaaccagccatctagggtataacatcatgaaattattacatttacataaactgaatgaggcaaaacccaccttgaagttgctcatgcgcttgtgatggtgatccagcaaattggccaacgaatcgatgagcatcaggttccaggcgttgtccttgctcaccttgttgccattgtagagctccaagcaatttttgatggtctcattgtcctcgatggactccagagtgctcgaccggtgatgctgctgaaggagcgtgcgacgtcgggcttcccgcctttccgcctcgtcgtcgttaaagggggttagcatgcgggacaccccctcctggtaactgcctactgcggaccgcctgagcggagtttctaagcggggcagagtcatcctttcaaggaagtggataaatcagagatgaagtcagagaacagcacaaggaattttggttgccgtaggctgatggttttggagagtgttaataagcacactcacttttaataatagctgtgatcccaattcgacagttttgaattttttgttttttgatgatttgttgattgtattttgtctatttctgtttttgcgctggtattggtaatagtttacagtttctttcaaacgacgccgcaatttagggctgcatttcagtgttggttaaaactaaaggtgtgccaagctagctagataatatggacaggaaaatcgctaaagaattagctataaagtattgcggaatataattaactagtataaacatgatacataattttatcatatgagaaaaatgaaataaacaaacttaatttacaccttaaagcttcgaaatcgaataaaaacacgatagcttacaatggaatttctttaagttcagggctgcacaggtcctgccagtgctgaatggatttcaacaatggatggccgttaaatttcaaatacatgtaccatattaaagaaactacgatctgtaaaggaattaatctgtttcaatacttttagttttttatataattttcagtccggtagttaattagtattttttcttttgacaataaagtcttaacctaagcaatatttaatttgtaaaaacccttaatttttccttgggactcttgccaacactggcgctgataatcaccccatccctggaaggcggcaacttttacacacactgccgcagaaattgtagtccctcgcgcagttcacatcgaaccaatgtcgtgatttttgttagttttcgttgttttcgtctgataaactctaaataactatcagccagcgctgtgcgaaaagctcgatgtaatcgaattgggcagaagaaacgctcagagattcaaacccatagcttctatagatctatagcttttccgaagatcggactcctcgtgtatgtgtgcatttctgcctgtggtagtgctggagtaactggacatttcgaatttacgcagttccaggcaaacctaacgggttttccagttcgacttgcggaatagcaggaatacgagattacggggctacggagtttcggagttttggaatcactatggc

SEQ ID NO: 42881 - DNA, 2488 bp, DROSOPHILA
caaaaaacaaaaaattcaaaactgtcgaattgggatcacagctattattaaaagatgactctgccccgcttagaaactccgctcaggcggtccgcagtaggcagttaccaggagggggtgtcccgcatgctaaccccctttaacgacgacgaggcggaaaggcgggaagcccgacgtcgcacgctccttcagcagcatcaccggtcgagcactctggagtccatcgaggacaatgagaccatcaaaaattgcttggagctctacaatggcaacaaggtgagcaaggacaacgcctggaacctgatgctcatcgattcgttggccaatttgctggatcaccatcacaagcgcatgagcaacttcaagatggctggttcctctttagaagcctcttccaaggtttacggcctgcgtgtggactccatctacttggacgccatgcgcatttcagctggcttgagtgcacgaactcttacggataagcaaataaatgctgccgaggatgatgatggcccccaaggtgaacaggctactggcgagggtcaggactcagcgcaacaggcagcaaaagaagcagcaccgaagcccaaacggcaaaagaaacccatatccaccgtgaccaaaaacagagaaacgctgaacagccggctggatacggctcccttgcaggatcctgtgtttggcaagctgaactccactgtgggctctataaatgcttccaatcgtctgatgcacaacattcttcctagtttcgactctgaattgcgcttgcgtaccacctacaatttttggaacagcgaagagtccaccgaggaggtccaggaccacactacactcaatgcagaaatggaacaatggccagccacatcacttatgagcaccaatcttatgcgcaaactgctgccacatgctgaaaggtcaaatctgcgaccgctgcatacgggctacatcatcacaagtgctcccaatcccaagtcggcaaatgaaaaggccgccgaggtagtgcaggatgaagatcatgacgagggtctggataatgccgacgatatgtgtgtaaatgagatttccatggcctttgacatcaatgccgagtgtgagcccatgccggacctggatggaccaccgcctctggtgctggaggtggactccaatgagctggaagagctcactgccgaggagcaaatggtgatcaataattgccgtcggctacgtaagcagacagagttcatcgaggatttgcgaccggtagacgggaattccaagctagagtactcctacaggccgatggaccagatctcccagttttgggccggcccctcgcattggaagtttaagcggactcgcccgcgcagcactttctcgcagaccaatggacaggtggacactcagcctattcgcactcaacgagcgaagaagtcagcgcatctgaatgccaaccgaagagccaaggctttggactatggcaatgtgacggaaaacttcttccaacagctggacaccaccataaggcagcgcaaggcgaatttccaaaagaagtgggatccccgaaagctgatattgcccaccaagttcgaattggacccggatcttttcttcaagtacgaatccgctcccagcataaagttgtcgaaacgcgcaggtgaacctgattcggatgagggtggagatcttggcatcgatatggatgcggatatgcaccacgatgatgacaatgaccaggagctattcaacaacgagcattttaccgacgccgttcccgccaacgtgagcgttattgccgcgattgctgcggagcaagcggccgaggcaagcatgatgaacgtgtccgcgggtgagattggcctcacccagatgaacgccacttgcaacaacacagtcttcgagatcggcaccgagttcgagggtgcgccgtcgcaggttgccaaagtgattgttccattcgcgaagagagccaaggttatagacatgaagaatctgaaaaagtcctgcaactctctaatacagaaacaattgctaaacgctgtgccggaggagacgataccctcgcatcccaagaaaaagggcgaacactattcaaagggtttcgcgagttttcagcaggtgtatcagaagctgcccgaccttttgaccaccaaaatgtcagactcgctgtccccgtcggtggcattctatgcggttctgcatttggccaacgatttgaaactgcggctaattccgcaggaggacttggaggactttcaaattcgccaggtgttggattgaatttctttaattatttttcaattcatagttctagttgcccttaaatgctgttacaatttattttcacggctactccttaatctcttacctctatttttaactcccaattcgtatcagtattctgaaacagatatcctcaccccagtcgaattttatacacaaacgaagcattgttctgatttaaacactagttagtaaacaataaattaggaaatatctaagaaaa

SEQ ID NO: 42882 - protein, 735 aa, DROSOPHILA
MTLPRLETPLRRSAVGSYQEGVSRMLTPFNDDEAERREARRRTLLQQHHRSSTLESIEDNETIKNCLELYNGNKVSKDNAWNLMLIDSLANLLDHHHKRMSNFKMAGSSLEASSKVYGLRVDSIYLDAMRISAGLSARTLTDKQINAAEDDDGPQGEQATGEGQDSAQQAAKEAAPKPKRQKKPISTVTKNRETLNSRLDTAPLQDPVFGKLNSTVGSINASNRLMHNILPSFDSELRLRTTYNFWNSEESTEEVQDHTTLNAEMEQWPATSLMSTNLMRKLLPHAERSNLRPLHTGYIITSAPNPKSANEKAAEVVQDEDHDEGLDNADDMCVNEISMAFDINAECEPMPDLDGPPPLVLEVDSNELEELTAEEQMVINNCRRLRKQTEFIEDLRPVDGNSKLEYSYRPMDQISQFWAGPSHWKFKRTRPRSTFSQTNGQVDTQPIRTQRAKKSAHLNANRRAKALDYGNVTENFFQQLDTTIRQRKANFQKKWDPRKLILPTKFELDPDLFFKYESAPSIKLSKRAGEPDSDEGGDLGIDMDADMHHDDDNDQELFNNEHFTDAVPANVSVIAAIAAEQAAEASMMNVSAGEIGLTQMNATCNNTVFEIGTEFEGAPSQVAKVIVPFAKRAKVIDMKNLKKSCNSLIQKQLLNAVPEETIPSHPKKKGEHYSKGFASFQQVYQKLPDLLTTKMSDSLSPSVAFYAVLHLANDLKLRLIPQEDLEDFQIRQVLD

SEQ ID NO: 42883 - DNA, 8327 bp, DROSOPHILA
acaggagcgtggatgtggcaatcaccccgaatggctatgccgacggcttggccactcaaaatggacaggagtacttcgttttgccgctggagacgaaaatgaagctgtccgaggtggtccgccgcctggatgatcccactggtgctgtccactacatacaaaagcagaactctaacctcagtgtggacctaccggaactggctgctgatctgcgggtcagtgatctcgactttgcgcagcagtcctttaacaaaccgcctgatgctgttaacttttggctgggcgacgagcgcgccgttacctccatgcacaaggatccatacgagaacgtgtactgcgtgatatccggtcacaaggacttcgttctcatcccgccgcaccagcttagctgcgtaccgcgaggaatttaccctacaggcgtttacaagacctcagatagtggtcagttctacattgaaccgttgagggatgaggaaggcagcgatcagttcacagaatgggtcagcgttgatcccttgtcacccgacctggccaaatatccggagtacgcccgggccaagcctctgaaagtacgtgttcacgcgggagacatcctatacctgcccaactactggttccaccatgtgtcccaaagccacaagtgcatcgccgtgaacttctggtacgatctggactacgatagccggtactgctactaccgcatgctggagcagatgacgtccgcaaggagtggctaatagaatccggagaagtatttattctcagggattgttaggtgaattcaaaacccttcttgttttcagtgtatttatatatattattgttacataatttagtgttaaataaaaaactgatacccaaaatgagttgcgaactacgactaaggacacgaccataaaagatttatcttttccgaaattcgtaaatgaaatatgaaatatccgtacagatgatgacttcttaaataaggaatgtttgctttgttgggttattctctagtctattcgagactgacgtcctgtttttctgcgccggaaggctccgctgcagcctgtccatctgcctcctcgtcgggattttcgttgttctcgcactccagttcgccatttcccgcggaggagacgttcttttggtccgcctcggccaagtctgcatcgttattcgagtcctgcgactgggattgggactgtttgcgcacacgctggttcttcagcttggccggactggctccagaaggtgtcaccttcgacttggtcttgcagctatcctgcggctgttccaccacaaacagctgctccaaataagaacggtaccaaagcaggaactcgtcccgctgtcgtggtatgtccatcttcttgatcttggcatatatgcgtttgggcgaaattagtggcgagctggcggtcgaattctgggcagcagtggccgtcagctttgatacctctgccagtagggagtcattgatgacggtgttgttgtgcgtctgattgcgaatgcgtttgataatgtactcgattagttcgtgatccggtgccagttctatgctggtccctggtcctgatcccgagccagaggcttgttctagttttccctcgaggatttgctggtaaggaagacgcaattatgagttaatcgatccagtttacgaaagcctttcttacctcttcgttctcggtcctaagagaagagataacagcagaagcactgtcctccatttcatccaggtgctgcccgttctgtggattggacaaacttagctgcttcactggcgttcctttttcgtcctcgggccgatcgttgtctagctgcagacgcattacctctagcggggtttcactgcgactctcggtggcctcggcgtcgccagtaggttcgttctcctcctggttaagagcctttcgcaagccgtgtggttcatgtgagtgctgcagctgctgattttgttgctgttgttgttgctgctgctgctgctgctgctcgaagagtgtctccagccggcggtagacatcctccttgattgattcataaaactttgtggtgaacttgtcgttcttcagagcgttaaccagcagatttcgattcagttcctcggaggccgtttcctcggtttgctccatggcatttgattcgtccgcgggcgatgcttcttgtccgagcgtaggagtagtgtccactggagtaatctggggtagctcgatgtagtccatgtagtgagctggaagttcgaagtcgaaacgaagatgtcgctgctgcagaggagtaagcgacacagtcgaagtggtgggctttgctggtaccttgttccgctgatacagcggactgttgccatagtttacgttcatgttgagattggaggagctagcctgctcggactcatcatcccgcagcgtggaaagctgaggacggcgacgattgcgacgtcgacccgagccgaatatgacgttatcatggttctcctccacctcgtccacatcctcatcgtcgtggtcgcgaatgtggcctgcatcatcgcgccagtccctttttctgcccgaactgccgctgttgttgagattattgctgccattggagctgctgccatgcaaagcggttagtggcgcctcgaaaaagtgacgacgctgctgctggtgggtcaaaccaccacgcgtagtaggcggaagcaactggggcggctgaaagtagctgggacgtgcccgttgtcgccgatactgctggaggtccacgttcagctcctcgttgcttttatttgataagagattttggcgcgaatggctggaagagcgtacagatattaatgggttaatgcaagcgggtagcaaagaatcatgcagttgataaactagctaaatctagtgagcgttactaagttaagtttttctattccatatatcctttttaaattgaatacacatcttttataaattagctttgtttactgccgaataggcacttgcaaaacttggtcagtacttggagttagtcttggttagtcactttcaactctgttaatgggacacttatctgcaacgcgtggtcgcacttaccggtgcacagaattgaaaattaactcttcacaatagttttatttaatttttattgcttttgacccttttccatcaaacaaccattaataaatccaacaccaaagttataaagcattacctgcggaagttgtcccagtagttgttggctctgtttccgggtggtacttgattgttcaatgtaataccgccaccaggtgctcctccaccagctgctccctcgggcagcgagtgcagattgttggcatgctggttctgggttcgcagattcgagttgttctgatgtatcgtgttgttatggtggttcatgaagatgggacctggacttgagcggtaagtaggcggcgacaggggtgtctcgttgttgaagtgcgtcggcggtggcgggggagcagcattgttaaggaacggctgcgcctgatgctgctgctgttgatgatgatgcgattctgccccgctacgatgacagctgcgctgatagttactaaaggcgctctggtgggcaccaaagttaaatagctgctcagattgagctcgactgctgcccaggcacagattgttgggcatctgacccattccagggcccaccggaggcggtactgattccgagcgcaagccgaagctgtgatcctggcatgctacaacattaaatcgatcctggagctgtgaaaaaacacttgaattagtctttgattaggctctctaatctcatggattgtcttaccgcatgtagctggtggttgaggttgtcgatttcgcgctgttgatgccacagtgcctggttgcactggcacacagagttgataagcatttgctgcgtctgcatgaactgctgcagcagaactgcgtcggtagaggcattcgatccggatccatttgaggagcccccttgttgggcggctggcagctttttaaactctgtgccggcactggagctcggctgaccgtagacgggctgctgtccatgccacgaacttccagagttgtgtgatgctgctagcggatgcataaaaataagcgtaaaacgaggaaactaatacatgaattcaagttggtaaagtaaagttggtaaatttccgcctttgttggtggaattaaaaacgtaccccacattccaggcactggttgcatggggggcggcatgtactgcgatctattgctgctggatggtatgctgtcattacccagggatagcgtatcaagtgtcacattcaggtcatcttcgtttagcgtcgacggaggagcaggcggcggtggtggtggtgcctgctgtgggggaacgttaggttgctgacctcgtcgttgctccaccactgtgttggcggatggagccctctttagggtcgctgaggaagcggtacgtacgttggcgaagtacttatcgctgtcagtgtcgtcgtttgcctcgtcatccgcctccgatgtggtgttgttactggctacgtaacgctgctccagttcccgctgcttctgctcgtattccgttcgcaggcgctcgcactgcgagcgcagttcatcgcgcagttgttccttggtgggcgtagcctgaagagaattatccacttcggatggatcctcttcctcggtcatccgctgtctcatgggggtgggtgttggggtaagactgcttcttttaagtgcatcatcgcccatttgaacagcggcggccgcctgttgtttgcgtcgctcaatctctgccttcagggctaggatacggtcacgctccttttgcaagcttgctgcttccgctctcagttcgctcgtaacatcgttcagagcgaatacgcgctgggcaatctcggccggcaattcgcgctccacgctagttctttcctcactacgccgctctaaggtggagcccatgctgggagtactttcttcaatctggctaacagtgtacagcattccctttagtctcgccatctgagccttgagtgcttctatatctgccgtcttctggttgatcattgcctgtgcgtgaagtgcccgttgagcagcgttggccgcctcctggcgtatgatgggtacgtttctctgatactccacaggaacaacacgctccttgggagccgctggggcagcctcctctggcttgggaggaggcgtgggagtctcctctttctctttgatgactctagcagtctccctggccgcacggttgatgctgtttagttcgtccaccagattgcgcatatcctcacgttgggtgcgcagtgattccagtttctcctgcagggcttcctgctcggccaggatctcgggcccatcatcgccaagcaccgtgctcagttcgttctggttgtgtataaaggcggtgagattcttcatgcgccccaccagcgacgccatgtcgtcctgtacctgctgcacggactcgtatttgggggcctctcccccattgacattgtggggtaagctatcggcttgctggcgcagccgctccatctcgttaaggtgagtcttggccaaattttggatttgtaacagcttcgcctgttcgtcgtgcaggtgctgcatgttcctattggaggcttccaagcgctgctgcaactcatcgaagctgggcgtggtatcgggcgtgggcgtttccaagacgctgtgtagggactgaatggattgggcgcggttgtcgctcatctgaaaggtacaaatggtttgagtactagaaggcagacttttggttttattaaccaactaacctcgcttaatgcaacatcctccaagctggtcgaattgactacgccttcaccctgatccgaatttgggttgatttcgtgcaccatgttgttcgtctggggcaagaattaaaggatttagtttcatttattattacgatataaaaaatgttattatcaatcttataaatgttataaatgtacggctcacttgaagttcctgacacaagctttcaaactcacctctacaactttcctactcggttgatatctgctattcaggttctcgtctaatcctagcagggcgcgtaacacgtcaacctgcgagcgaaaaccttcggttctgggagcaaaatggtgtacaccaagaagtcggtgaacgagttgttgcagtccagcgggggtcagtggcggtgcctgctcctcgttgccactcaaattgccgtttccgttgctggtagttgcgttcggtatgaccacacctactgtggcattcggaggcgtcgattgacgcaaacgcagcaaagccgtcgaagatgagggggcgcctgtgctattagctgacgaggatggctggtgctgaaccctctggacaggacggacggggaatcgatagcgctgctgctgttcctgcagttgctctgtaatggaaaatagccaaagatcagtatggatgtttaggtccattgctaaatactgcgctgcgaactacatcatctcagtgggcgtttattttcgtgcgcatcttatttatagaacatgaactggcgcaccgatctctgtgtgggccaggccgatcactttgccaggtgcggatattggaaattgctcaattaaatgtgtatattcctcaacggtttcaggacccattacctgctgtatcgtagttgccgtgttcggcggccaactgacgcagtgcctcgcgctgctgttgctgttgtgcaggcgacctgtgatccttgctagacagatgctgctccgccggcgatcgattcttggcgttggtgatgcgtgctcgctggaggagatcctttaagcaacagtaaatgaagattagcaggaaaaccagcacgaggattgcggtaattttgctgattttaggtctatatatatatatctatttcagatatatatatatatatgtataagggcgctgctctggccgatcgaaattcgttgtccgcagtggttgagttcgcattcgctactgagccagcggctaacgaatttccgcaggtcgcgatgagtgtaaagtgtatttataaaaccaagaagagaaaggtcttggtgtcttctcttcgagaagatttgccatggcaaccagacgtccgtctaacttacattcagagttttcagcgtctcccgctgcagcgtctctggctcgacaagttccatgtccggttcgcccaggtgctcctgctgccggcgagagcgggccgaccggctggatgtcacagatgcactcgacccggacgtgggtgctccgtttacaggcgtttgttgtttaggcaccgcaccggttgccccgcccaccgagttgttgttgctgctgccattgctgcgggcgctggcgttggcttggtccacaactaccttgggcggcggcgccattagaaaatatatatatatatatttgcgtacaaaaaacgacgctacaaaattgaaaaaactcctcttttttgtactcccactttgtttttttgctttgcgcactctgacagctgttcccaaccagggctggaagctagttaacaagcctaccaagttatggtcacactggcagcggacgttttttgaaatcgaatgttttctaaaattcaaaaataaatattatttttagtttaaaataaaatgtatatctgtaaaaagtattttaaatgcttttggtgtagataaactaacgttacttggtaatttgatatcttttaaggataattatttatttggagattactttataatatgttccttggataataaacattatatgactagagccattttccctttcaagtttggacgtgcctactttccctgcttgcgctggatgatgtcctccttgagcgcacgaatccgatccctctccgcccggagtcccaccgcttgaccgcgtagatcactggtgaagtccgtgaacatgttaagcatggaattcaggagctcggcgttatcgggagcactcgacgaggtcgatggattctcttcttgggcactctctacggcctcgctggccactcggacttctgacgaggtggtctgcctgctggtctgaacggaggtggagctctggacctgtaccgtttgcctggaggacatgtgctcctcgatcatcttggtggtgtccaccatgttctgcacgcgcttaaactgcgccttcaggttggcgatctcgtttagcttctcctgcagataactggcctgctcctctttgtcctccccgccctcttcctcaccagatggtgcctcttcccggtttgtgaactctccagaagcactggcggatgaagcaactgttactgtctccgatgaggattcaacgtgggactgaacctcctcctcctcggtggactgccgcacttgtcggcgctgggcattcagaagggtcagctca

SEQ ID NO: 42884 - DNA, 4974 bp, DROSOPHILA
atggcgccgccgcccaaggtagttgtggaccaagccaacgccagcgcccgcagcaatggcagcagcaacaacaactcggtgggcggggcaaccggtgcggtgcctaaacaacaaacgcctgtaaacggagcacccacgtccgggtcgagtgcatctgtgacatccagccggtcggcccgctctcgccggcagcaggagcacctgggcgaaccggacatggaacttgtcgagccagagacgctgcagcgggagacgctgaaaactctgaatgatctcctccagcgagcacgcatcaccaacgccaagaatcgatcgccggcggagcagcatctgtctagcaaggatcacaggtcgcctgcacaacagcaacagcagcgcgaggcactgcgtcagttggccgccgaacacggcaactacgatacagcagagcaactgcaggaacagcagcagcgctatcgattccccgtccgtcctgtccagagggttcagcaccagccatcctcgtcagctaatagcacaggcgccccctcatcttcgacggctttgctgcgtttgcgtcaatcgacgcctccgaatgccacagtaggtgtggtcataccgaacgcaactaccagcaacggaaacggcaatttgagtggcaacgaggagcaggcaccgccactgacccccgctggactgcaacaactcgttcaccgacttcttggtgtacaccattttgctcccagaaccgaaggttttcgctcgcaggttgacgtgttacgcgccctgctaggattagacgagaacctgaatagcagatatcaaccgagtaggaaagttgtagagacgaacaacatggtgcacgaaatcaacccaaattcggatcagggtgaaggcgtagtcaattcgaccagcttggaggatgttgcattaagcgagatgagcgacaaccgcgcccaatccattcagtccctacacagcgtcttggaaacgcccacgcccgataccacgcccagcttcgatgagttgcagcagcgcttggaagcctccaataggaacatgcagcacctgcacgacgaacaggcgaagctgttacaaatccaaaatttggccaagactcaccttaacgagatggagcggctgcgccagcaagccgatagcttaccccacaatgtcaatgggggagaggcccccaaatacgagtccgtgcagcaggtacaggacgacatggcgtcgctggtggggcgcatgaagaatctcaccgcctttatacacaaccagaacgaactgagcacggtgcttggcgatgatgggcccgagatcctggccgagcaggaagccctgcaggagaaactggaatcactgcgcacccaacgtgaggatatgcgcaatctggtggacgaactaaacagcatcaaccgtgcggccagggagactgctagagtcatcaaagagaaagaggagactcccacgcctcctcccaagccagaggaggctgccccagcggctcccaaggagcgtgttgttcctgtggagtatcagagaaacgtacccatcatacgccaggaggcggccaacgctgctcaacgggcacttcacgcacaggcaatgatcaaccagaagacggcagatatagaagcactcaaggctcagatggcgagactaaagggaatgctgtacactgttagccagattgaagaaagtactcccagcatgggctccaccttagagcggcgtagtgaggaaagaactagcgtggagcgcgaattgccggccgagattgcccagcgcgtattcgctctgaacgatgttacgagcgaactgagagcggaagcagcaagcttgcaaaaggagcgtgaccgtatcctagccctgaaggcagagattgagcgacgcaaacaacaggcggccgccgctgttcaaatgggcgatgatgcacttaaaagaagcagtcttaccccaacacccacccccatgagacagcggatgaccgaggaagaggatccatccgaagtggataattctcttcaggctacgcccaccaaggaacaactgcgcgatgaactgcgctcgcagtgcgagcgcctgcgaacggaatacgagcagaagcagcgggaactggagcagcgttacgtagccagtaacaacaccacatcggaggcggatgacgaggcaaacgacgacactgacagcgataagtacttcgccaacgtacgtaccgcttcctcagcgaccctaaagagggctccatccgccaacacagtggtggagcaacgacgaggtcagcaacctaacgttcccccacagcaggcaccaccaccaccgccgcctgctcctccgtcgacgctaaacgaagatgacctgaatgtgacacttgatacgctatccctgggtaatgacagcataccatccagcagcaatagatcgcagtacatgccgccccccatgcaaccagtgcctggaatgtgggcatcacacaactctggaagttcgtggcatggacagcagcccgtctacggtcagccgagctccagtgccggcacagagtttaaaaagctgccagccgcccaacaagggggctcctcaaatggatccggatcgaatgcctctaccgacgcagttctgctgcagcagttcatgcagacgcagcaaatgcttatcaactctgtgtgccagtgcaaccaggcactgtggcatcaacagcgcgaaatcgacaacctcaaccaccagctacatgcgctccaggatcgatttaatgttgtagcatgccaggatcacagcttcggcttgcgctcggaatcagtaccgcctccggtgggccctggaatgggtcagatgcccaacaatctgtgcctgggcagcagtcgagctcaatctgagcagctatttaactttggtgcccaccagagcgcctttagtaactatcagcgcagctgtcatcgtagcggggcagaatcgcatcatcatcaacagcagcagcatcaggcgcagccgttccttaacaatgctgctcccccgccaccgccgacgcacttcaacaacgagacacccctgtcgccgcctacttaccgctcaagtccaggtcccatcttcatgaaccaccataacaacacgatacatcagaacaactcgaatctgcgaacccagaaccagcatgccaacaatctgcactcgctgcccgagggagcagctggtggaggagcacctggtggcggtattacattgaacaatcaagtaccacccggaaacagagccaacaactactgggacaacttccgcagccattcgcgccaaaatctcttatcaaataaaagcaacgaggagctgaacgtggacctccagcagtatcggcgacaacgggcacgtcccagctactttcagccgccccagttgcttccgcctactacgcgtggtggtttgacccaccagcagcagcgtcgtcactttttcgaggcgccactaaccgctttgcatggcagcagctccaatggcagcaataatctcaacaacagcggcagttcgggcagaaaaagggactggcgcgatgatgcaggccacattcgcgaccacgacgatgaggatgtggacgaggtggaggagaaccatgataacgtcatattcggctcgggtcgacgtcgcaatcgtcgccgtcctcagctttccacgctgcgggatgatgagtccgagcaggctagctcctccaatctcaacatgaacgtaaactatggcaacagtccgctgtatcagcggaacaaggtaccagcaaagcccaccacttcgactgtgtcgcttactcctctgcagcagcgacatcttcgtttcgacttcgaacttccagctcactacatggactacatcgagctaccccagattactccagtggacactactcctacgctcggacaagaagcatcgcccgcggacgaatcaaatgccatggagcaaaccgaggaaacggcctccgaggaactgaatcgaaatctgctggttaacgctctgaagaacgacaagttcaccacaaagttttatgaatcaatcaaggaggatgtctaccgccggctggagacactcttcgagcagcagcagcagcagcagcaacaacaacagcaacaaaatcagcagctgcagcactcacatgaaccacacggcttgcgaaaggctcttaaccaggaggagaacgaacctactggcgacgccgaggccaccgagagtcgcagtgaaaccccgctagaggtaatgcgtctgcagctagacaacgatcggcccgaggacgaaaaaggaacgccagtgaagcagctaagtttgtccaatccacagaacgggcagcacctggatgaaatggaggacagtgcttctgctgttatctcttctcttaggaccgagaacgaagagcaaatcctcgagggaaaactagaacaagcctctggctcgggatcaggaccagggaccagcatagaactggcaccggatcacgaactaatcgagtacattatcaaacgcattcgcaatcagacgcacaacaacaccgtcatcaatgactccctactggcagaggtatcaaagctgacggccactgctgcccagaattcgaccgccagctcgccactaatttcgcccaaacgcatatatgccaagatcaagaagatggacataccacgacagcgggacgagttcctgctttggtaccgttcttatttggagcagctgtttgtggtggaacagccgcaggatagctgcaagaccaagtcgaaggtgacaccttctggagccagtccggccaagctgaagaaccagcgtgtgcgcaaacagtcccaatcccagtcgcaggactcgaataacgatgcagacttggccgaggcggaccaaaagaacgtctcctccgcgggaaatggcgaactggagtgcgagaacaacgaaaatcccgacgaggaggcagatggacaggctgcagcggagccttccggcgcagaaaaacaggacgtcagtctcgaatag

SEQ ID NO: 42885 - protein, 1657 aa, DROSOPHILA
MAPPPKVVVDQANASARSNGSSNNNSVGGATGAVPKQQTPVNGAPTSGSSASVTSSRSARSRRQQEHLGEPDMELVEPETLQRETLKTLNDLLQRARITNAKNRSPAEQHLSSKDHRSPAQQQQQREALRQLAAEHGNYDTAEQLQEQQQRYRFPVRPVQRVQHQPSSSANSTGAPSSSTALLRLRQSTPPNATVGVVIPNATTSNGNGNLSGNEEQAPPLTPAGLQQLVHRLLGVHHFAPRTEGFRSQVDVLRALLGLDENLNSRYQPSRKVVETNNMVHEINPNSDQGEGVVNSTSLEDVALSEMSDNRAQSIQSLHSVLETPTPDTTPSFDELQQRLEASNRNMQHLHDEQAKLLQIQNLAKTHLNEMERLRQQADSLPHNVNGGEAPKYESVQQVQDDMASLVGRMKNLTAFIHNQNELSTVLGDDGPEILAEQEALQEKLESLRTQREDMRNLVDELNSINRAARETARVIKEKEETPTPPPKPEEAAPAAPKERVVPVEYQRNVPIIRQEAANAAQRALHAQAMINQKTADIEALKAQMARLKGMLYTVSQIEESTPSMGSTLERRSEERTSVERELPAEIAQRVFALNDVTSELRAEAASLQKERDRILALKAEIERRKQQAAAAVQMGDDALKRSSLTPTPTPMRQRMTEEEDPSEVDNSLQATPTKEQLRDELRSQCERLRTEYEQKQRELEQRYVASNNTTSEADDEANDDTDSDKYFANVRTASSATLKRAPSANTVVEQRRGQQPNVPPQQAPPPPPPAPPSTLNEDDLNVTLDTLSLGNDSIPSSSNRSQYMPPPMQPVPGMWASHNSGSSWHGQQPVYGQPSSSAGTEFKKLPAAQQGGSSNGSGSNASTDAVLLQQFMQTQQMLINSVCQCNQALWHQQREIDNLNHQLHALQDRFNVVACQDHSFGLRSESVPPPVGPGMGQMPNNLCLGSSRAQSEQLFNFGAHQSAFSNYQRSCHRSGAESHHHQQQQHQAQPFLNNAAPPPPPTHFNNETPLSPPTYRSSPGPIFMNHHNNTIHQNNSNLRTQNQHANNLHSLPEGAAGGGAPGGGITLNNQVPPGNRANNYWDNFRSHSRQNLLSNKSNEELNVDLQQYRRQRARPSYFQPPQLLPPTTRGGLTHQQQRRHFFEAPLTALHGSSSNGSNNLNNSGSSGRKRDWRDDAGHIRDHDDEDVDEVEENHDNVIFGSGRRRNRRRPQLSTLRDDESEQASSSNLNMNVNYGNSPLYQRNKVPAKPTTSTVSLTPLQQRHLRFDFELPAHYMDYIELPQITPVDTTPTLGQEASPADESNAMEQTEETASEELNRNLLVNALKNDKFTTKFYESIKEDVYRRLETLFEQQQQQQQQQQQQNQQLQHSHEPHGLRKALNQEENEPTGDAEATESRSETPLEVMRLQLDNDRPEDEKGTPVKQLSLSNPQNGQHLDEMEDSASAVISSLRTENEEQILEGKLEQASGSGSGPGTSIELAPDHELIEYIIKRIRNQTHNNTVINDSLLAEVSKLTATAAQNSTASSPLISPKRIYAKIKKMDIPRQRDEFLLWYRSYLEQLFVVEQPQDSCKTKSKVTPSGASPAKLKNQRVRKQSQSQSQDSNNDADLAEADQKNVSSAGNGELECENNENPDEEADGQAAAEPSGAEKQDVSLE

SEQ ID NO: 42886 - DNA, 3338 bp, DROSOPHILA
atggtcattgaaaacgcccttaattgcaaatcattcctgcgcctttacgaatttgctagtacgactactgcgaacacatcaatcgaattattcaactaactagtttctacctttcaggcatcacccatcgtgaccttaagcctgacaatgttttgctggagaccaatgacgaggagaccctactgaaggtctccgatttcgggctgagtaagtttgtgcagaaggactcggttatgcgcacgctctgtggcacacctctctacgtggcccctgaggtgctgattaccggcggccgagaagcctacaccaagaaagtggacatttggagcttgggagtggtgctatttacttggtaagtcattatgttattctcctacgaagataacttagcaatatactcatatcttgcagcctgagtggcactctgcccttttcggacgagtacggcaccccggcggcccagcaaataaagaagggcagattcgcgtatggacacccttcttggaagagtgtctcgcagcgcgccaagctgctgatcaaccaaatgctcattgtggatcccgagaggcgaccctcaatcgacgacgttttgcagagcagctggctgcgcgatgcgcccatgctgcagaaggcgaagaggctgatgaagctcgatggcatggaaatcgaggaggagaacttccttgagccacccaccaagcgatcgcgacgctaggtttcgtttctgtgtttccatcgttaatacgtgagggtcgaggcgcgaaaaggttttaattttctggaaaaattaagcgacaacatttttcccaaaacgccgacaccgccgcatccgagtgtattggcgaatttaagtattttttgcggttgttaatttttacgtgttgtctagtgtaagtttcatcgcccaagcccggtttatcctgttaaactgcatttaaactgggctgctgcttcacaatttttttaagattcctatcgatttgaattctgccatttcattggactattattacgatttattacttgtaactgttcagtaactataagtgttaaatgtaagaatgactcttcagcaaaccattccgctttttgaaataaagcaattgaatttgttcggcagcaaaattatttgatagcgtgcgtcaccattttgcggccatgtccaatggtgatgagggtgctatcatcggtccaaacggcatcagttaggcgagaatgggtgtcctggtgcgtgtagatgaactcatggcccgcctgcacattggccactttcacggaggcgggcaaattgctcatcgcagccagatggggcctgaaaatatgtgcgttaatgcaaatcgtcattgtttcgcttaaacttgtacccattgattaataactgggcgacatggcccttgtcgaagtattccctggtttccgccagttttcgtggcactcgaatgtccagagtatgaactttgccgtcatagtccccgagatagatgtgattgtcaccctgcagctccgaggcagctgcccaggcggcactggtgaagctcagcacgtggctggcatccgcatagaggcacgtggaagatggagccgctgcccggacatcccaaaggcgggcacagccgccacgatcacaggtcacaaatttatcgactgaagctgcgggtgtggccaggccagtcaacttgtcggtatgcgaggagcgcgatctgtaggtgctcaccatatcggcgcccgagagatcccagacctgcaaaagggtaacatttgtatattttccatacatccacatcacctttatacatacattgagggtactgtccgctgagcccgaaacggcagtgcggggatccgccttgaagacgctcagttggctgatgggtgtgggatgcgcactggactcgcccacgaggaagaggcagtatggcgactgagaatctcgcaccttggagtatgtggaccaggcctggagtcgggtatccccaagggccaccagtaggaaatcatcctcagcgtagcgcacaatgttcaccgtgtgctccgcctgcagcttgaagttcgccgagtccacgctcatatggtgcatctggtcgcgtccgtagccgaacaacatgccccaccattggcgtccttcgcgtcggtttgtggccagggccaggtggttgtgatcattgatagcgatgctgtcccagcagtcgtgcagtcgcggcgaaaggttttccaatcgcgcgtttaggtccgcaatgttgaggttcgggtactccagattcccggccagctccagtgccggcggaggctggtgggtcaccggagtgcggtacagctccgagctgcgttgcgggaacatcgtctctcactcaagattccgtaaaacaacagagaatcggccagcaaggaagagcaacgagcccggcaagaccaaatacatcgatttgtgtaccaatcgaaatatcgatattattagacattaatattagagataatcgcgcgagctggatactctggagttttttttttttttttttttgattggtttattcaaaatgagttcgtttattccgattaatatcagtattatgaactcggaaaaatgtatactgacctattttaataatttttaattgcacttcttcacgagttgagatgaaagtgtcgattaatagaaagactttgaaaatacgttttgcaagttttttttagcatttctatttacagctttcattttcaaattgagcaatcttggtgcgcatcatcactaggaggacatccaaaattatgatagttagtcatttatagattggtcaaaggattggttaaaggttcagaacacgttcagaattccttactcatttttgataaaattgtgaaggataattttcaagaacaacactttaaaatgccataaagaatatatttatttatataacaataagacttccgatacaggagttccgaaatcgccaggcggtaattaaaaaaagagaatggcgcactttacaactgcaaagtttctacattacgtttacatttcacattgcttaacggtatagttgtgagcaacggtattttttaggggatttcccgccactatggacatttaccgttcgcttgcaagcggtcacacagttgttatttttgtttattattatcgcgtcgctcgttgcgcgctggtttattttttgaaaagtgcgttcctagcgcgagtggtcagcgtcccaaacgtcgtagattccatcgcctgagccatcaagaactaaatatttccttacataactgcggaatacttcgactctgcagtaagccacgcgacggaaggcaatcaacaaagacacgcaagtgcttgcaca

SEQ ID NO: 42887 - DNA, 1229 bp, DROSOPHILA
atgttcccgcaacgcagctcggagctgtaccgcactccggtgacccaccagcctccgccggcactggagctggccgggaatctggagtacccgaacctcaacattgcggacctaaacgcgcgattggaaaacctttcgccgcgactgcacgactgctgggacagcatcgctatcaatgatcacaaccacctggccctggccacaaaccgacgcgaaggacgccaatggtggggcatgttgttcggctacggacgcgaccagatgcaccatatgagcgtggactcggcgaacttcaagctgcaggcggagcacacggtgaacattgtgcgctacgctgaggatgatttcctactggtggcccttggggatacccgactccaggcctggtccacatactccaaggtgcgagattctcagtcgccatactgcctcttcctcgtgggcgagtccagtgcgcatcccacacccatcagccaactgagcgtcttcaaggcggatccccgcactgccgtttcgggctcagcggacagtaccctcaatgtctgggatctctcgggcgccgatatggtgagcacctacagatcgcgctcctcgcataccgacaagttgactggcctggccacacccgcagcttcagtcgataaatttgtgacctgtgatcgtggcggctgtgcccgcctttgggatgtccgggcagcggctccatcttccacgtgcctctatgcggatgccagccacgtgctgagcttcaccagtgccgcctgggcagctgcctcggagctgcagggtgacaatcacatctatctcggggactatgacggcaaagttcatactctggacattcgagtgccacgaaaactggcggaaaccagggaatacttcgacaagggccatgtcgcccagttattaatcaatgggccccatctggctgcgatgagcaatttgcccgcctccgtgaaagtggccaatgtgcaggcgggccatgagttcatctacacgcaccaggacacccattctcgcctaactgatgccgtttggaccgatgatagcaccctcatcaccattggacatggccgcaaaatggtgacgcacgctatcaaataattttgctgccgaacaaattcaattgctttatttcaaaaagcggaatggtttgctgaagagtcattcttacatttaacacttatagttactgaacagttacaagtaataaatcgtaataatagtcc

SEQ ID NO: 42888 - protein, 367 aa, DROSOPHILA
MFPQRSSELYRTPVTHQPPPALELAGNLEYPNLNIADLNARLENLSPRLHDCWDSIAINDHNHLALATNRREGRQWWGMLFGYGRDQMHHMSVDSANFKLQAEHTVNIVRYAEDDFLLVALGDTRLQAWSTYSKVRDSQSPYCLFLVGESSAHPTPISQLSVFKADPRTAVSGSADSTLNVWDLSGADMVSTYRSRSSHTDKLTGLATPAASVDKFVTCDRGGCARLWDVRAAAPSSTCLYADASHVLSFTSAAWAAASELQGDNHIYLGDYDGKVHTLDIRVPRKLAETREYFDKGHVAQLLINGPHLAAMSNLPASVKVANVQAGHEFIYTHQDTHSRLTDAVWTDDSTLITIGHGRKMVTHAIK

SEQ ID NO: 42889 - DNA, 4071 bp, DROSOPHILA
tctgggtgctgctcatcgtggttggcctgagttcgatgtacttccatgccactttgagtctgattggccagctgctggacgaactggccatactctgggtcttcatggcggccttttcgctcttctatccgaagcgatactatcccaagttcgtgaaaaacgatcggtaagcactgtgatcccctgacggctggcactatctaaatcccccgactttcggtttcctttgttcccccagcaaaaccttcagttggctcatgctcttgtcggcgattgctgcgacgggcttgtcgtggtggaagcccattgttaacgcctttgttctcatgttcatgagtgtgccgaccatggtaatgctctacacagagctgcagaggtaagttcacctagacgatatacacaactcgtaaatctgagggtcttaccgataagcaggcggctctgatttcccgcctggtgacccgaaattaaccgaaaggcccataaatcatgtatcctaacatcactcatccctgctatcacgtatgcttttttgttttatctttgggagccaaaactatttcaaccttatcagcacctatttaatcagctttattttctttgtcatcgatgatatgttatggttcgagtaggtcaaaaatcaaaacgaaggggtgtttccctgcactggcattgaatgtttgggaccaggcgtcggtgcatcaatcaatcatgtcaatcgatttcagtgtgtaattaagataaacctggagtagagtactctgctcgagggcttattgtttatattggcttaggtagtcaactggccactgattatttcctttgggacttacagttgtcacaaagtttcgtaatgtatgacgtatctgggttgcaactgagtaatggatttatacccttaaattgaatgtaggaaactatagaaaaagtaacgatagatatagtgggtacacaatggtatctttctttccttattatgaattatacaatttaaccagtgctaactaggcctacttaagctgtccttgcaaatgcaatacttcttggcattcttgcgatttatacagttggcatcattcttgtaggaggtcaatcgacttagctcctcgacatcgaagtgaagaagcctttgggttcgactattccagcgcacagtggcctcaaaaattgggtttttcgggacagtttcgaaaacaatgatgtaaacttgctcgtttttatcagccggccgaagtccgttggacaggatggttttgcgatctgctttctccacataatccaatgtgaaattgtggcaaagatcgctgagattatggctaattaagtgttcgttcattcgctggacaatagcctcggcaattgtgctcacatgcggggaattcgtaatggtttccgtgggctggcaacagcaccatttctcctcgattccggccatttggcaagtgcgattgaagggcagctcgaagaaaagcgactgacagctcttacactgccttgcccttagattatccgggaactcatccacggacttgctatccaactggagcaagtgctggagcgtcatgtacacatcgtagttggacgagagtcgattctggttcttgccgagattactcgccaaatggggatacttgcgccggaaccagggtggcaagtagatgaacatcatcggcatgcgctcctcgaaatacccagtggaagcccgcctcaaagtgttataccggtggccatgatcactcatcagaatcacaatggacttctgaaagagattggactcctcgaaggactttagatacttccagagcaggttgtccagtgcagtggctccctcgtagtaatcgtgggtgaagctattgctccatagaaagccgaacattggggatctgccgaggaagcgatcgatgaactgctggccaaagtcccagacgtagctgaagctgaggtggcgacccacgcagtaggcaaatccgaagtcattggtcactttaaattgtttttcgatggcgaaaagtagtgggcgaaggtagtaatccgttggctgcttcacaaatcccggtttcaggtaattgaaggtactaatagatgaacaatcttcggcgaaggctgttgtgtagttggctttcttgaaacgcttccaaatgaagttcagggagtccaagcagcccggctttgtgacatcacaataatcccctactcccttttcggaatcccctgtcagcgcggccagaagattgggaaaggtattgtcgcccaccttattgtagccctgcatttcgaaccagccgggttgtctaacgaatttgtaaaccgatggcatggctcgtcgaagatttatgcgcgatgtggagtccagtcccatgatcagaacgctcggcttgtgcacctcactttcgtccttcacgaaatccttgaccttctcctttgggaggcggtcctcgatgaaggaaatggcatcctgttgcagcagctcccggtgcttggtcacatccctcacgtagcaactggtgatcatgtagtcggtgttgttcggaacgaactggtgctgctctatgggccgccttcttagctgactgaaagaaatccaattgggcttattaacaaagtcagaaagcttctctaatctccttcaaccattatcggaataatatttatacattcatatctgcatggtatgctcatacttacttataggcattgtcgggcttctggtcggagttatcccgtgaaatctcctggtactcgcactccagggtggcattgcccttcctgttcataatgggcttggccaggtgctcgtgcacatgcagtcggtactgatgtgtctcgaagtcgaattcactcgttaccatgtcgctgtcgttgtggcaatgccttagcgtctttctgtggaaattactcattgtgtcccacgtgaagggattcacggcgggcatctggcacaccggactatatacatagtaatcatctgcgccctgaacaaggttctcgatccaaaaaccaaagcatattacgattaaaagggcttgaaagtccttacgcgacagcgtcatgatcacctttgactgcagcattttcattggcggaccgaaagtctcgtttaataattgcattcacaacgcttggctaatttaacacgaaaagcatgagcgtttcttttcgaattatttcgaaatataacaacttattaatacccatatatatctttgttcatacagagttagtgaccagagggtctaccgcctgggcatccgatcgacgaccgtctgggctgttgcggtgttctgctggatcaatgaccggatcttctgcgaggcctggtcctcgatcaattttccatacctgcacggcttctggcacatattcatttttatagccgcctacacggtgctggtgcttttcgcctacttctacgtggaatcggagctgccccagcgacagccgctgctgaagtactggccaaagaacgagttcgagttcgggatacccttcatttcgatccggaatccaggtaaggctctgcgcaacaccatctaaggacgattgcgccggaatggagagctggcagagaagtgaccaaagaccaagcgataatatcgtacatgctttaaaaccatacacaattattgtaaaattgcggcaacgtaattgtagcgcacactttttatatagttgaaacagtttattagccatagatgtatttatattaagcaaacgaatcggattcgcggttgtacccaaaagagataagtctgttaacgccttaagattcggtgcacctgaacacttgggcctaaaacaataatagtagcgccctgcttagtccataaatgaatgggcgattgctccgtggaactattgtagaaagacatatctaaatgatgtttattgttccgtctatcccctaaaatgagtttaatcaaagtcttctaacccgttctatgagtatgagttaccatcagactgtgatatgttatgaactaattcatcccatgacttccagaacaaatggttcctacgctttcccaaagagacaaaaaatcgtattaggttgtcagtacctgaatttgttaa

SEQ ID NO: 42890 - DNA, 1956 bp, DROSOPHILA
atgctgcagtcaaaggtgatcatgacgctgtcgcgtaaggactttcaagcccttttaatcgtaatatgctttggtttttggatcgagaaccttgttcagggcgcagatgattactatgtatatagtccggtgtgccagatgcccgccgtgaatcccttcacgtgggacacaatgagtaatttccacagaaagacgctaaggcattgccacaacgacagcgacatggtaacgagtgaattcgacttcgagacacatcagtaccgactgcatgtgcacgagcacctggccaagcccattatgaacaggaagggcaatgccaccctggagtgcgagtaccaggagatttcacgggataactccgaccagaagcccgacaatgcctataatcagctaagaaggcggcccatagagcagcaccagttcgttccgaacaacaccgactacatgatcaccagttgctacgtgagggatgtgaccaagcaccgggagctgctgcaacaggatgccatttccttcatcgaggaccgcctcccaaaggagaaggtcaaggatttcgtgaaggacgaaagtgaggtgcacaagccgagcgttctgatcatgggactggactccacatcgcgcataaatcttcgacgagccatgccatcggtttacaaattcgttagacaacccggctggttcgaaatgcagggctacaataaggtgggcgacaatacctttcccaatcttctggccgcgctgacaggggattccgaaaagggagtaggggattattgtgatgtcacaaagccgggctgcttggactccctgaacttcatttggaagcgtttcaagaaagccaactacacaacagccttcgccgaagattgttcatctattagtaccttcaattacctgaaaccgggatttgtgaagcagccaacggattactaccttcgcccactacttttcgccatcgaaaaacaatttaaagtgaccaatgacttcggatttgcctactgcgtgggtcgccacctcagcttcagctacgtctgggactttggccagcagttcatcgatcgcttcctcggcagatccccaatgttcggctttctatggagcaatagcttcacccacgattactacgagggagccactgcactggacaacctgctctggaagtatctaaagtccttcgaggagtccaatctctttcagaagtccattgtgattctgatgagtgatcatggccaccggtataacactttgaggcgggcttccactgggtatttcgaggagcgcatgccgatgatgttcatctacttgccaccctggttccggcgcaagtatccccatttggcgagtaatctcggcaagaaccagaatcgactctcgtccaactacgatgtgtacatgacgctccagcacttgctccagttggatagcaagtccgtggatgagttcccggataatctaagggcaaggcagtgtaagagctgtcagtcgcttttcttcgagctgcccttcaatcgcacttgccaaatggccggaatcgaggagaaatggtgctgttgccagcccacggaaaccattacgaattccccgcatgtgagcacaattgccgaggctattgtccagcgaatgaacgaacacttaattagccataatctcagcgatctttgccacaatttcacattggattatgtggagaaagcagatcgcaaaaccatcctgtccaacggacttcggccggctgataaaaacgagcaagtttacatcattgttttcgaaactgtcccgaaaaacccaatttttgaggccactgtgcgctggaatagtcgaacccaaaggcttcttcacttcgatgtcgaggagctaagtcgattgacctcctacaagaatgatgccaactgtataaatcgcaagaatgccaagaagtattgcatttgcaaggacagcttaagtaggcctagttag

SEQ ID NO: 42891 - protein, 651 aa, DROSOPHILA
MLQSKVIMTLSRKDFQALLIVICFGFWIENLVQGADDYYVYSPVCQMPAVNPFTWDTMSNFHRKTLRHCHNDSDMVTSEFDFETHQYRLHVHEHLAKPIMNRKGNATLECEYQEISRDNSDQKPDNAYNQLRRRPIEQHQFVPNNTDYMITSCYVRDVTKHRELLQQDAISFIEDRLPKEKVKDFVKDESEVHKPSVLIMGLDSTSRINLRRAMPSVYKFVRQPGWFEMQGYNKVGDNTFPNLLAALTGDSEKGVGDYCDVTKPGCLDSLNFIWKRFKKANYTTAFAEDCSSISTFNYLKPGFVKQPTDYYLRPLLFAIEKQFKVTNDFGFAYCVGRHLSFSYVWDFGQQFIDRFLGRSPMFGFLWSNSFTHDYYEGATALDNLLWKYLKSFEESNLFQKSIVILMSDHGHRYNTLRRASTGYFEERMPMMFIYLPPWFRRKYPHLASNLGKNQNRLSSNYDVYMTLQHLLQLDSKSVDEFPDNLRARQCKSCQSLFFELPFNRTCQMAGIEEKWCCCQPTETITNSPHVSTIAEAIVQRMNEHLISHNLSDLCHNFTLDYVEKADRKTILSNGLRPADKNEQVYIIVFETVPKNPIFEATVRWNSRTQRLLHFDVEELSRLTSYKNDANCINRKNAKKYCICKDSLSRPS

SEQ ID NO: 42892 - DNA, 6756 bp, DROSOPHILA
tccacattagatcacaaaacaaaatttaaccaaaacaaacaaatcgcattaaagtgtgctttaaagcttgtggcttatcataatgaaaccaaaacacaattcaaattataatcgataagaatgtaaaattatttacaatctttcctagaatatcgaaaacaatctaaaggacatttgagacattttttcaagctggctttgacaaaatataaatggttcggagaaacacaaatacatacatacatatggcgatgaacggcgatgaatcaaatactgtatttataatgcctagagaaatgcacaaatcggttttaaactaaagttatataaagaataaatcgttaagtttgtcaaattaatacaattaatatacaataataaaagcaactgtctccaagacgcaaaaattgaaatggaacctaattgcaacatagaacctaataaaattgaccctggatatccttgggaaatagtcgtttaatttattaatctttatttatatcatttagttcaggttattgactattttaaattgatttaggttagcgcatgaatgtgtttaaacaacgactagatttataatcactctcacaatatgctgatgctacagttaccacaattatataacagactccaaggattacggatctgcgtacgacactaaaagcgatacaaatacttggctaaacatactgaacacaaattccactaagatccctgtatctgggttaaataagtactaggacactgccttaaacctccacgtggttcatcagcagtggcgtattggcagtgggataagaggagggtcgccttttattatgttgaccacccacgatttcaatactttggcaggacagggtcagcgatagggtcgtctcctcatagcgcgactgtgtggatcctcccgaggaacggcgcagtcccgtgtaggagtccacctccagcagtgcctcgtcactaaaggaaaaaagaatttttaacatttctttttgctaacttaataaatgttgtcaaacctgtgatagcgatgatgctccaggaggctaccagcagcaaatcgtagcttcttgggtgactccagactggaagagcgcgtcagcgagtttctgggcagattcttttgcttgagggaggagcgtatcccgtactcgttggcctgttcctgggcctgctttatggtgccctggatgaacttgttgagtgccctggatccgcgtctctgagatcgctcataggtgcgacgagtgcgtgcctcctcatcttcgcccagcagccagtaagtgcgctgatcaccttttcccttcattgagatgacgccacgctccgcaaagtgatagccacccagcctatctagcagttgcctgcactgccagctgcaatgaatcttcaggggaacaccactggactccatgcgggaagctgtatttacagtatccccgaaaagacagtaacgtggcatcttcagacccacaacacccgcacaaacgggacccgagtgtatgccaatccgcaggagcaagcggtttgtgggccggtgacggatcttaaactctgatacggcactgagtagatgcaacgacatggtggctatttccgcagcatgcaagtcaccattgcgcagcggaagtccagagaccaccatgtaagcatcaccgatagtttcaactttgtagacatcatagtggccaataattgaatcgaagcaggtgtacagatcgttgaggaaatctaccacctgcaacggggtgcattcggcagacatcgctgtgaagcccacgatgtcgctgaagtagatgctaacctgttcgtagtgttcggggtccaccttgtgacccttcttcaactggtcagctacgcagcgcggcaacatttcgtgcagcagtgcatcggtcttcttcttttcttcctgcaattgatccgtgcgatcgtcaacgagagcctccaaattattggcatacttctccatcattgccatcatattgtcgaaaatgttgggtctcatcccctttcgcagaggtcttagtttggtgcggatggttttgaaatctggacgatcctctggcctctccgcccagcattctctcaggcactcgctgacgcagtcaaaggccgtttccagcggttgcaaagatggtctgtatggattaaggtaatcctgcggctgaagaaccttttgcaggcactgcatgggtgtcagacccgtctcaccaaagggtcctctacggacatgcatctcgtacaggagaatgccaaaggaataggcatcccctcgttgtgtgcccatcaccagcgaggatggaccctgtcgcagcagctctggagctcgataaagaagctctgaaacagggaaggtattcaaaaactttaaagccgattacttaaaaaagcgaactcactcagacacttggccgacatatgctgcatatctgtggagctgtcttcaattccttgtttgaaagcaaagaggccaaagtccgttagcttgaccacccatcgggagtccaccaggcagttggaggtgcatagagcgccatggaagcgaatgggcgagtcgtgcaaatagatgacgccctgccaggatggggaaagaggtcagtgggtgggtcggccattagtataatgttacagcactcacgcgtataatgtctgccaccatggaggcaatgaacatgttgtccagcttgacgtcctcgttctccagaatgtcctgcaatgaaaaggaagtgggagtcgctttgggtctttcagggaactgattgaccgactgaccttaaggctgccgcgggtgcagtactcgctgatgatgcagatgtttggcggatccgtgcaggcgcctatgaaggcgcatatattgtcgtgccgggcatctcgcagctggaataggttaggacattttaaatggattatgctttaccgtaactattcgtcttaccagctttagctcctttttcatttcgcgggtgatgtccacgctcttctttcgcacctttttgatggcatacagctgacctttgtacagtccgatgggcgtaaagattgtcgtgtagcggaagtcggcgtccggattggagctcaggctcacctggctggtgcgtatcagtggatgggtggactgcggaggaagacgacgcggcaagtgatttagcaagtgctattgtcagacatgcaatggcgggagaagagtctttaacaggaggaatatatgagcctttgctaacacagtctcacaaaataaaatacatgcagcttaaatggtccttctgcatgcactttaaaataacctaataagtacagcccacattttgctatatcatggtttcccaggataaattttgaagaaacactactacttatttaaattgagatacttttaagcatcgataacatatcactttaaggctcagtgtactgcctgccattaggctaagcgtcactaccatcgcactaagatgacaggcactgggacttacgcgcgtctgcttctgactttgctgttcacgttcgttctcatggatctgcacttcacgaaagtcaatcttccagagcagactgtccagctcctgttcgtaccgccagttgcgatagaggaccagcgagaccaagctgagcagcaatagggcacctccggcaatggccgctgaaatttcgccagtgtaatctgcgattcgagagacggtgaaatggtaagctcacagaattggtcagtaaacacccatactcactgacgcacttctcgccgccaaatccgcaccgaggagcagctgctggtcgcgtgccacccacccagtcgatggggctgaacagtttgagattctgcggtaaaccaatggaaaccaggattaaatcaaaacacagggggcaaaacaaaacgaggtgtgtgattaattgtgccaggcagaagcgcttacctggtgctgcacgggtcaagcgatttatggaggattggcagagagcaagttacaagagtatgtatgttaaaaaacatggatttacttacgggcaacgccttgctgatgctgctcaagctgctgttccggtgaatgaaggttcccacgggtcgcaggcccaggacagtctgattgcgaccatttcgcacggatcctcttgctaatactgtataatttccagctgcatcgccattctcatcgatgtagacgtgatagctgaaacaaaaatagatatgtgtgttagctcaattgccggattagctgtcaaatgggccaacacccaccccatggcgctgcgatatcgcgaacccttgatggccgccacaatggcgctgccgttcctgggtcttccgcccgaatccaggacttccatcaaggccttcgcgtaaagatgcacagcatcgtagagataggcagcctcggcgcttatctggcaaggaagagaagaggttggaggtcagtcaatggttttgggtttcgtcttcggtttcatgggagacgaacctgctttactccgccgaagggacccagcggattggggaaattgaatggcggtcgctccatgtatttgttgacctgaaaaccaaaacggaatgagggtcagaatgtgtggtcaatgtggcgaaaggcccgacaattatgagacgtgcggaaggcggatgcagcgcatcaatcacatcactgtccggacctgtcagcggacaaacctcattggcaaaagtggcaaaggagacggacgccgtgggcacaatgcccagatatgactgaaaggcctgcacggccaatggctccacatcctccagcaggagtcctcgcaaatacttttctggcttggccggatcatactgttcaatgtctatgccgactacgaaatagtcgccctttgacagaattcctcttctttggagactaaccatcagtccgacatgctcatagtagtgacccaaaatgagatagactattggcacatgaaatgtgattagtatgcatgaaatttccactacaagacctacttactcctcgtgttggcataggtctgctccaccagcgcctcaaatggattgtccataaatccgtgatggtagatggtattccaagtgcgaatgtcccggatactgactccggcatcagtcagtgtgcttaggatggtctccgccacgggctgatactgaccactggcgtcgtccaagtaaaggaagctgacttgcgtccagttaaacgccagcaaaagggccactacggacttggagatctgcgtgtccggtggacgtgtcctggcaaaggtgggaaaatcagccttgttcgagggatcccgatgggtgcagtactgtaggaaataacgtattatgaaagatattgcacaagttcttactgctgacttacataagatatcatgggcaggttaaaggcggccgccatgcgaccttcgtgtacgcaagtttcctgggggccaatataggcggccacctgctgcgtccacagtgccgccgtttgacggatgctgaccacctcctcaccgtaagtttcggccacgacgaactgaagggaatgaccccgatccctgagtcgtccggcattcacctcctccaccgccagcgagatggcgccggatatggtgagaccgggtcggttgtagtccaggtttcccggccgccgttgcgaggccgtgaggtaacccagcgtgaagacctctccatgagtcggccggaagttgctaaaagcgagcagaaagaggagcaggagcagtggatgcagcagtcctgagtggtagtttccagctggagcaggacaggggtgagcaaacattacgcggggacgggaatcgcgtgaaatgctgctcctttttgtcaggggggcgcttaatttaaacggaattatttcatgcaactgatgagggttctcctttgtgtgacagtgtccttggcaacagatgttgatccttcgaggagatgcaacaacatttttgttgagtttgcattgctcccttctccttcgaatccacttcctacttgttttgctgtgggtgtgcccactcccgtctggttaattgcgtcctcgtcttggccaactccctttgccgtcagtcgtttcctgttctgcaagtaagaggactttaatcacaacatcgttttactcaagacttgtgagaacaacccaaggacaaggctgggtcatgcaggagtgcctctgatttatgcgggggcacatacatggtgatgtagtacgccctgcctccccaaaagccaacatccatatgggtgggcaaataacacataaactaatgctggatactttggcggaggcaccataaaagatggctgccgtaatgacgcacaagatttcatttatatacacttacgcacatgccacttgcttaagacaattaatacagtatacatttcttaatctttctagagattttaagggtgttactggaatttttctttgaggagaaaccttcatttttgcaacagcttaaattctaagtgatctgcataaattatggttgaatttttattgaaagccggacaagtaaacacattttggttaaaccaagttgctggtttaacttcatggctttcatacaatttttgttgtttgcaataaacttgccaactcaaattgtttagacgaattcggtaataacaaggatgtaaaagtttaatttgtctggatgaacttaagttcgtgtcatcttaaaaataatgccatagagaaaattgcgttaaggacccgcttttttctttctaacgaaatgtttggtaataaagaagttcacctcgctgaatggataaagaacttaagt

SEQ ID NO: 42893 - DNA, 3519 bp, DROSOPHILA
atgtttgctcacccctgtcctgctccagctggaaactaccactcaggactgctgcatccactgctcctgctcctctttctgctcgcttttagcaacttccggccgactcatggagaggtcttcacgctgggttacctcacggcctcgcaacggcggccgggaaacctggactacaaccgacccggtctcaccatatccggcgccatctcgctggcggtggaggaggtgaatgccggacgactcagggatcggggtcattcccttcagttcgtcgtggccgaaacttacggtgaggaggtggtcagcatccgtcaaacggcggcactgtggacgcagcaggtggccgcctatattggcccccaggaaacttgcgtacacgaaggtcgcatggcggccgcctttaacctgcccatgatatcttattactgcacccatcgggatccctcgaacaaggctgattttcccacctttgccaggacacgtccaccggacacgcagatctccaagtccgtagtggcccttttgctggcgtttaactggacgcaagtcagcttcctttacttggacgacgccagtggtcagtatcagcccgtggcggagaccatcctaagcacactgactgatgccggagtcagtatccgggacattcgcacttggaataccatctaccatcacggatttatggacaatccatttgaggcgctggtggagcagacctatgccaacacgaggatctatctcattttgggtcactactatgagcatgtcggactgatggttagtctccaaagaagaggaattctgtcaaagggcgactatttcgtagtcggcatagacattgaacagtatgatccggccaagccagaaaagtatttgcgaggactcctgctggaggatgtggagccattggccgtgcaggcctttcagtcatatctgggcattgtgcccacggcgtccgtctcctttgccacttttgccaatgaggtcaacaaatacatggagcgaccgccattcaatttccccaatccgctgggtcccttcggcggagtaaagcagataagcgccgaggctgcctatctctacgatgctgtgcatctttacgcgaaggccttgatggaagtcctggattcgggcggaagacccaggaacggcagcgccattgtggcggccatcaagggttcgcgatatcgcagcgccatgggctatcacgtctacatcgatgagaatggcgatgcagctggaaattatacagtattagcaagaggatccgtgcgaaatggtcgcaatcagactgtcctgggcctgcgacccgtgggaaccttcattcaccggaacagcagcttgagcagcatcagcaaggcgttgcccaatctcaaactgttcagccccatcgactgggtgggtggcacgcgaccagcagctgctcctcggtgcggatttggcggcgagaagtgcgtcaattacactggcgaaatttcagcggccattgccggaggtgccctattgctgctcagcttggtctcgctggtcctctatcgcaactggcggtacgaacaggagctggacagtctgctctggaagattgactttcgtgaagtgcagatccatgagaacgaacgtgaacagcaaagtcagaagcagacgcgctccacccatccactgatacgcaccagccaggtgagcctgagctccaatccggacgccgacttccgctacacgacaatctttacgcccatcggactgtacaaaggtcagctgtatgccatcaaaaaggtgcgaaagaagagcgtggacatcacccgcgaaatgaaaaaggagctaaagctgctgcgagatgcccggcacgacaatatatgcgccttcataggcgcctgcacggatccgccaaacatctgcatcatcagcgagtactgcacccgcggcagccttaaggacattctggagaacgaggacgtcaagctggacaacatgttcattgcctccatggtggcagacattatacgcggcgtcatctatttgcacgactcgcccattcgcttccatggcgctctatgcacctccaactgcctggtggactcccgatgggtggtcaagctaacggactttggcctctttgctttcaaacaaggaattgaagacagctccacagatatgcagcatatgtcggccaagtgtctgaagcttctttatcgagctccagagctgctgcgacagggtccatcctcgctggtgatgggcacacaacgaggggatgcctattcctttggcattctcctgtacgagatgcatgtccgtagaggaccctttggtgagacgggtctgacacccatgcagtgcctgcaaaaggttcttcagccgcaggattaccttaatccatacagaccatctttgcaaccgctggaaacggcctttgactgcgtcagcgagtgcctgagagaatgctgggcggagaggccagaggatcgtccagatttcaaaaccatccgcaccaaactaagacctctgcgaaaggggatgagacccaacattttcgacaatatgatggcaatgatggagaagtatgccaataatttggaggctctcgttgacgatcgcacggatcaattgcaggaagaaaagaagaagaccgatgcactgctgcacgaaatgttgccgcgctgcgtagctgaccagttgaagaagggtcacaaggtggaccccgaacactacgaacaggttagcatctacttcagcgacatcgtgggcttcacagcgatgtctgccgaatgcaccccgttgcaggtggtagatttcctcaacgatctgtacacctgcttcgattcaattattggccactatgatgtctacaaagttgaaactatcggtgatgcttacatggtggtctctggacttccgctgcgcaatggtgacttgcatgctgcggaaatagccaccatgtcgttgcatctactcagtgccgtatcagagtttaagatccgtcaccggcccacaaaccgcttgctcctgcggattggcatacactcgggtcccgtttgtgcgggtgttgtgggtctgaagatgccacgttactgtcttttcggggatactgtaaatacagcttcccgcatggagtccagtggtgttcccctgaagattcattgcagctggcagtgcaggcaactgctagataggctgggtggctatcactttgcggagcgtggcgtcatctcaatgaagggaaaaggtgatcagcgcacttactggctgctgggcgaagatgaggaggcacgcactcgtcgcacctatgagcgatctcagagacgcggatccagggcactcaacaagttcatccagggcaccataaagcaggcccaggaacaggccaacgagtacgggatacgctcctccctcaagcaaaagaatctgcccagaaactcgctgacgcgctcttccagtctggagtcacccaagaagctacgatttgctgctggtagcctcctggagcatcatcgctatcacaggtttgacaacatttattaa

SEQ ID NO: 42894 - protein, 1172 aa, DROSOPHILA
MFAHPCPAPAGNYHSGLLHPLLLLLFLLAFSNFRPTHGEVFTLGYLTASQRRPGNLDYNRPGLTISGAISLAVEEVNAGRLRDRGHSLQFVVAETYGEEVVSIRQTAALWTQQVAAYIGPQETCVHEGRMAAAFNLPMISYYCTHRDPSNKADFPTFARTRPPDTQISKSVVALLLAFNWTQVSFLYLDDASGQYQPVAETILSTLTDAGVSIRDIRTWNTIYHHGFMDNPFEALVEQTYANTRIYLILGHYYEHVGLMVSLQRRGILSKGDYFVVGIDIEQYDPAKPEKYLRGLLLEDVEPLAVQAFQSYLGIVPTASVSFATFANEVNKYMERPPFNFPNPLGPFGGVKQISAEAAYLYDAVHLYAKALMEVLDSGGRPRNGSAIVAAIKGSRYRSAMGYHVYIDENGDAAGNYTVLARGSVRNGRNQTVLGLRPVGTFIHRNSSLSSISKALPNLKLFSPIDWVGGTRPAAAPRCGFGGEKCVNYTGEISAAIAGGALLLLSLVSLVLYRNWRYEQELDSLLWKIDFREVQIHENEREQQSQKQTRSTHPLIRTSQVSLSSNPDADFRYTTIFTPIGLYKGQLYAIKKVRKKSVDITREMKKELKLLRDARHDNICAFIGACTDPPNICIISEYCTRGSLKDILENEDVKLDNMFIASMVADIIRGVIYLHDSPIRFHGALCTSNCLVDSRWVVKLTDFGLFAFKQGIEDSSTDMQHMSAKCLKLLYRAPELLRQGPSSLVMGTQRGDAYSFGILLYEMHVRRGPFGETGLTPMQCLQKVLQPQDYLNPYRPSLQPLETAFDCVSECLRECWAERPEDRPDFKTIRTKLRPLRKGMRPNIFDNMMAMMEKYANNLEALVDDRTDQLQEEKKKTDALLHEMLPRCVADQLKKGHKVDPEHYEQVSIYFSDIVGFTAMSAECTPLQVVDFLNDLYTCFDSIIGHYDVYKVETIGDAYMVVSGLPLRNGDLHAAEIATMSLHLLSAVSEFKIRHRPTNRLLLRIGIHSGPVCAGVVGLKMPRYCLFGDTVNTASRMESSGVPLKIHCSWQCRQLLDRLGGYHFAERGVISMKGKGDQRTYWLLGEDEEARTRRTYERSQRRGSRALNKFIQGTIKQAQEQANEYGIRSSLKQKNLPRNSLTRSSSLESPKKLRFAAGSLLEHHRYHRFDNIY

SEQ ID NO: 42895 - DNA, 4443 bp, DROSOPHILA
aagtctgaatgcttttctgatgtgattattattaaatagcgttatgaaaacagcttaatttgctttgataaactcatataattggaaccccattaaaattcaattaggtgatgactacattttaaattttttgtttcagtaaaaatatatttgaatataccaaagaacgccataaaacacccataatggagactccaagcaagtacgacatttcaaaaattgcattaacatccggtagaatttttgccgctggcgaacttgcagttccaactggaattttcagcaccactgttccaccaagagaattctccgcactcagaaaggcaaaaattctcaactggagctcactggcagcgccgtcagcagagcagccgacgactgcgtaaatttatgtgagaaatggcaattgaaaaaagagcagtgcggcgcgctcacgacacacataaagcaaaataatggcacattcgtcacacttaacgcggccgcatctggccgtctcgctcgcacccgcgtctgcccctctcgctcgcactctcgctctctgcctgcgccgccatccatcttgtgcgtttgtgtgccgcgcttgtgtgtgtgcggtctctgagaatgctttatgagtgtgcgtctgtggcggactcctccctgtttacgacgctggcagcgccgcaagcagaagcagcggctgcaaaaattcggccaacttgtgttgttgttctttttccgctccacaacagctgtgggagagcgagagcgtaggagaaagagagagagtgagagcgatgctgaattgtgattgtgtgcgtgtgagtgatggcctgcatgtgtgcgtgcatgtgatttgttgttggcgcgcttcgatataaactcggccatgatggttttgccgtcggcaagtggatgtttggatgccatactccccggttccaagtaccgtattccgggttccataattcacggcggccatcattctcccgattatcgaatgttagccgataatgagatatcaaaacgtctagatatgacttcatcgggcaaatcacatttgctatacaaaactgttaattatgtatggttgtggtatatttacaaaaataattattaaaagatacgtttatacgtttatataccatatctataagcgttaattaagaacatctaacgcaaacgcggaaggcagacatacacccggtaccagactctagagctagagaaggagtttcacttcaatcgctacttgacccgtcggcgaaggatcgagatcgcccacgccctgtgcctcacggagcgccagataaagatttggttccagaatcggcgcatgaagtggaagaaggagaacaagacgaagggcgagccgggatccggaggcgaaggcgacgagataacaccacccaacagtccgcagtaggatcgacggagtctacccacttaaatgaaatttctatctaaatacaatttacgttagttcggagagcgcaaatgaatttacttcgatcccagaggactatctaataactatccaatccgttgaacttcgcgtgaacaaacctaaactaaactaaacaaagagcagagctgagaactctacctacaacttagttaattgttattattttctacttattatttaattgtacacgaaaggcaagtggggaaagcgaaataagattaacgtaaagatagcgattacgataaagatacaagtaaagcgtaaaactcaaacaaaaccaactcatgtgacctcagatctaaataagctatatttaactataatgcatatatatatacacataaatatatggataactataaatgataccaagtaaagctaaaggcaaggagttatatataaataaatatatatgaagcatatataatgtaacattagatctacgcgtcataagtactatacgattaacttatatatacaccccagcataaaccctaaaactaaacctaaacattaaactaaatcaatgtttgtagcaatcctagcgcaaaaatataaaataaaatccaataaataaaaataaaaaacaaatggcgtcaaaatccattgcatgttggttcataaaacctatacatttttcataactctgaacatgataacagaaaactttgacctaagtgaatgtcgcacttttagacaaagaaataccaaaactacgaaagaagcgttgcttaaagtgaaattaacgttttacacatacaataagagtaaaacctataaactggcagatgcttaactataaatagaaagaactcgcaagagattggccaacttaaaaaaaaatagatgtatatttctacgacaattcaactttcaaaaactcgcaagtggatatttatgcttaaccaatttgagagttccccttttctttggcttcaatacccattatatctgtatttttatttgtttgtaatttcttgtgcaatttttagttcttgcaaaaaaacaaaattcgaattaggtcgaaaaggatataaagtataccgaattacaaaaaaatatgaattggcaagtaaggaggaaaaataaaaattgttaacagagaatcatatgtataaataatgaattctaacaaaacccgtgtaaagtagtaaattgaaatgcattattatacgagaatgtagggaatccattttgaaagagcaaccgaacgatttaaatatgaatatttccctaacaactatattaatgtatgtgtacgtaacttaaaatcattttccacgccatctgtggaaatccatataccaaagtcaaaggaacgaaggagaaagaaaaaggaggacggaatggcaaactataaagtatcatatgtttatatgtagatatatatatttaaacaagcctaatacaaaacatgtaactttatagagcgtttcgtttgtaaattccccagaaatcccatttacctccccagcccgaatcccaatcccaggtgaaaagacttgtgatttgcaatagaaccgaatagtcaagaaaaaaaatctttacgaagtattggctaagcaacattgagagcaaaattcaactcaatccagatacgtaactttcggcctcattctgtaagaaactaattatttaagtttcaattatgaaaattattaaaaaaaaaacgaacaaaaaaaaaaacgtaaatataaaaaagtagaaattcacaagaaacaaaattcgaaagcgttgattaaaatatatatatatgtgaaacaaaaacaaaaaaccttaaacaaacccaaacatttgtgcgaaattggaacgaaatgtggaagctaaataatttgttgtaaataaaatttaaactttagtgtaaagaagagaacggagaatgcagtgaaagggctgcaaagcggaaagcataaagaaaattataactaaattacaaatgagattttgtttttatttgtaatatttataataaaaatatagtatttaaaaatttataacgaagcggttattattaggaagggtttttatttcagtgaatcctatttgtctggagcttctaagtgtgaaggtaagtattttaaatttaattattttgtatttgaagtaatcattttctgtttatccaggtatttttactgaacactaatcgcatgaatggagatttttttgattacgtcatacggtaagcactgaatcgatattacaatttcacgtggtacatgtcattaaacatttgttttttttttcagacattcgccgcgaaccatttttgaaacgatcttattaatctgacatcataataagcgattaatcaagtggcattaacaaagcactgaccaatgaccaacccagacacctgagccccggacccaaagaccacgatcagcagctgctccacccgcataaactcacttcaggttgactcaacccgatctttgagccagccaggagctcatacaaattgaaatttcattgttggcgtaatcgccagcgatttgtaatcgcgaaattcagtgaatgtgctcacgtttatgtcacagaatcacatgaataataatctagacagaatttagagtttggaaaatgcccagcagacatccttgtattgctgctggcggaagagatgtcagctttcacgtcgaggtgttcggcgcaatcagaacgcatccctagatgacataaatagcctccgatttgaacagctgccaatttggactcacggatgcgattttgaatattgcatttccatggccgaatcagcgacatcgagaggaggcatattcccacaaatttttgccaactttgagttcctatttggttttcggtctgctgaagttaattaaaatggttcctacttggcgctcaaatagaatttcattatgaatcctacctagtccactgagtgtagatatatagatcttaaggagcacatacttatgccgtgagtctcatatttgatggggtgtgataatgagttgaatggcttattacaa

SEQ ID NO: 42896 - DNA, 5058 bp, DROSOPHILA
atatcaaaacgtctagatatgacttcatcgggcaaatcacatttgctatacaaaactgttaattatgtatggttgtggtatatttacaaaaataattattaaaagatacgtttatacgtttatataccatatctataagcgttaattaagaacatcttcgagacaatcgaaatcaaaaacgttttttactcttataagtacttaagcagcataacaatttacaattattttacataataggcaaacagaaactttcgacctttccattgcaaaaccctattttagattattttcactggtaaaataaataaataaatgagtttgtaaattaatgattcagtctgaagtaatcgacggattgatactttaaaaactaaaaagtcaacacaaggcctttagagaaccgtatttgtaaattgtacaattattttaattgattttatagaaggtggtctcccacaaaatggtagatttgaccgcaaaaatttaaaaacaagtaaactgaagatgtacacatctttcacatcgttacgctattttaagaaattaaaagcaaatgaattgattgaccatatagtccagaagaatggttaaaaaggtataaagatattaagttataaagatatagtaatcgctcttcgaaataaaagtagaaactactcgataatgcccagacaatcgaattttaaatagtttcgattttagagaaactgaaaagagcacttaagagaaagaaacttaaaattgaaccttgagtttgataggagtcgtaaagaaatcaacatcacacaacaaagcactcgaggacccgtccgtgttccgttgacttagcccacgtgcgactgtatgtgtgtgtgtgcgagagggatcccagcagcataacggtattcggtgccccgtattccgtagtcgctatagcggccaatatcttggggctgggctctctattcgcattcgtattcgctcgctctccgtcgtcgcgaccgctctcttatcccaattgtcagcccgctaagatcataaaggccgtaaaaataatcataacaataatcgtaaaaaattagaaccgcaatcagtcgcacactgtccatcgcatggcgcagatcgtcataaacccattattataataataaccgtaatcgtaaccgtaatcgtaattgtaatcgcaggcgccatcgcataaacagcaaacaaaaacaccgtcagagaaattggaattgaacttcgcgcgcgtttctttttatgatgttcgagtgtctggcaggtgtctggattcaaattaaaattcatccacatattgtgcaatactactaatggatctgggctgactgtgctgcaaatgagctagagttcaaatttatcaagccaaatcctactacctaagtgtttatctattcttaaaaacgcatcgtgcaccgaaaactcgaatctgtacaacaacgttttctagtcccccgtaaatcgagcaatatctacacactagcaacaaacaaaagctgaagctttcaacaggagcggaaaaagtttcgattccactgcgggcaaactttttattttggcgcacgtgcaagctaccgttagctgagaattccaaaagccagcaggattgaaggataagcgcacgttattggatttaagagagtgcaattttggattagcccagctgtaaatggacaacaaaggtggattacctacatggataaggacaatttagccccgcaacgcaaaagtttactttgtatataagaaaagtagctaaaagcacgcggacagggaggcaggagcaccacagtcactagccactaagcagagtcacagtcacgatcacgttcactccaggatcaggactcggggcgggatcagcagacgctgaggaagctgccacgatgacgatgagtacaaacaactgcgagagcatgacctcgtacttcaccaactcgtacatgggggcggacatgcatcatgggcactacccgggcaacggggtcaccgacctggacgcccagcagatgcaccactacagccagaacgcgaatcaccagggcaacatgccctacccgcgctttccaccctacgaccgcatgccctactacaacggccaggggatggaccagcagcagcagcaccaggtctactcccgcccggacagcccctccagccaggtgggcggggtcatgccccaggcgcagaccaacggtcagttgggtgttccccagcagcaacagcagcagcagcaacagccctcgcagaaccagcagcaacagcaggcgcagcaggccccacagcaactgcagcagcagctgccgcaggtgacgcaacaggtgacacatccgcagcagcaacaacagcagcccgtcgtctacgccagctgcaagttgcaagcggccgttggtggactgggtatggttcccgagggcggatcgcctccgctggtggatcaaatgtccggtcaccacatgaacgcccagatgacgctgccccatcacatgggacatccgcaggcgcagttgggctatacggacgttggagttcccgacgtgacagaggtccatcagaaccatcacaacatgggcatgtaccagcagcagtcgggagttccgccggtgggtgccccacctcagggcatgatgcaccagggccagggtcctccacagatgcaccagggacatcctggccaacacacgcctccttcccaaaacccgaactcgcagtcctcggggatgccgtctccactgtatccctggatgcgaagtcagtttggtaagtgtcaagaacgcaaacgcggaaggcagacatacacccggtaccagactctagagctagagaaggagtttcacttcaatcgctacttgacccgtcggcgaaggatcgagatcgcccacgccctgtgcctcacggagcgccagataaagatttggttccagaatcggcgcatgaagtggaagaaggagaacaagacgaagggcgagccgggatccggaggcgaaggcgacgagataacaccacccaacagtccgcagtaggatcgacggagtctacccacttaaatgaaatttctatctaaatacaatttacgttagttcggagagcgcaaatgaatttacttcgatcccagaggactatctaataactatccaatccgttgaacttcgcgtgaacaaacctaaactaaactaaacaaagagcagagctgagaactctacctacaacttagttaattgttattattttctacttattatttaattgtacacgaaaggcaagtggggaaagcgaaataagattaacgtaaagatagcgattacgataaagatacaagtaaagcgtaaaactcaaacaaaaccaactcatgtgacctcagatctaaataagctatatttaactataatgcatatatatatacacataaatatatggataactataaatgataccaagtaaagctaaaggcaaggagttatatataaataaatatatatgaagcatatataatgtaacattagatctacgcgtcataagtactatacgattaacttatatatacaccccagcataaaccctaaaactaaacctaaacattaaactaaatcaatgtttgtagcaatcctagcgcaaaaatataaaataaaatccaataaataaaaataaaaaacaaatggcgtcaaaatccattgcatgttggttcataaaacctatacatttttcataactctgaacatgataacagaaaactttgacctaagtgaatgtcgcacttttagacaaagaaataccaaaactacgaaagaagcgttgcttaaagtgaaattaacgttttacacatacaataagagtaaaacctataaactggcagatgcttaactataaatagaaagaactcgcaagagattggccaacttaaaaaaaaatagatgtatatttctacgacaattcaactttcaaaaactcgcaagtggatatttatgcttaaccaatttgagagttccccttttctttggcttcaatacccattatatctgtatttttatttgtttgtaatttcttgtgcaatttttagttcttgcaaaaaaacaaaattcgaattaggtcgaaaaggatataaagtataccgaattacaaaaaaatatgaattggcaagtaaggaggaaaaataaaaattgttaacagagaatcatatgtataaataatgaattctaacaaaacccgtgtaaagtagtaaattgaaatgcattattatacgagaatgtagggaatccattttgaaagagcaaccgaacgatttaaatatgaatatttccctaacaactatattaatgtatgtgtacgtaacttaaaatcattttccacgccatctgtggaaatccatataccaaagtcaaaggaacgaaggagaaagaaaaaggaggacggaatggcaaactataaagtatcatatgtttatatgtagatatatatatttaaacaagcctaatacaaaacatgtaactttatagagcgtttcgtttgtaaattccccagaaatcccatttacctccccagcccgaatcccaatcccaggtgaaaagacttgtgatttgcaatagaaccgaatagtcaagaaaaaaaatctttacgaagtattggctaagcaacattgagagcaaaattcaactcaatccagatacgtaactttcggcctcattctgtaagaaactaattatttaagtttcaattatgaaaattattaaaaaaaaaacgaacaaaaaaaaaaacgtaaatataaaaaagtagaaattcacaagaaacaaaattcgaaagcgttgattaaaatatatatatatgtgaaacaaaaacaaaaaaccttaaacaaacccaaacatttgtgcgaaattggaacgaaatgtggaagctaaataatttgttgtaaataaaatttaaactttagtgtaaagaagagaacggagaatgcagtgaaagggctgcaaagcggaaagcataaagaaaattataactaaattacaaatgagattttgtttttatttgtaatatttataataaaaatatagtatttaaaaattt

SEQ ID NO: 42897 - protein, 378 aa, DROSOPHILA
MTMSTNNCESMTSYFTNSYMGADMHHGHYPGNGVTDLDAQQMHHYSQNANHQGNMPYPRFPPYDRMPYYNGQGMDQQQQHQVYSRPDSPSSQVGGVMPQAQTNGQLGVPQQQQQQQQQPSQNQQQQQAQQAPQQLQQQLPQVTQQVTHPQQQQQQPVVYASCKLQAAVGGLGMVPEGGSPPLVDQMSGHHMNAQMTLPHHMGHPQAQLGYTDVGVPDVTEVHQNHHNMGMYQQQSGVPPVGAPPQGMMHQGQGPPQMHQGHPGQHTPPSQNPNSQSSGMPSPLYPWMRSQFGKCQERKRGRQTYTRYQTLELEKEFHFNRYLTRRRRIEIAHALCLTERQIKIWFQNRRMKWKKENKTKGEPGSGGEGDEITPPNSPQ

SEQ ID NO: 42898 - DNA, 5880 bp, DROSOPHILA
cttgaacttcgccgaaagccactgatttggtatttgtgtcatttgggcgaaaggcagagcgaacggtgaattaatttatgcactgtccatttaatttgggtgttttaaaaatatggggaataatgcggtctttagatgggaatgatttatgcggactttgatattctatgggaatatctaataggaataaatatattcatgagattttttgtgagtggaaaaaaaatttttgtttctgtttgtaattttaataaattctttgactcttcaaggtacgtaattaattgaatttttaagtaaacttttcattgcaaataattgtatttaaatcttcttccaaacatctacatttgattaagctgcaaactattaaatactacaaatgtctatattagtcacgttttaaattaaaaagcaccataattaacattgaattgtaggactttatttaattgccttgtacttgaatttattacaagattatattatcaataaaacaaaacagctcttttaatggcaatgccgttgcgcatgcctgttttgttaacagaagtcagaattttaaaaagcgcctaaaagatgctataatatttgttctgttagcttcagtgttaacagaagtacagtgagtgtaaaagtaaactcgacacatttcttaaagaaacaaacacgtgttaagatttcaataaattatatttattgctagaactctcgtgacaaaccaaccaagcttttgaccaattgaacctcccccaaaaacgaggtcatctcttaatctttgcactacacactacaaaataaataaataaataaacatagttggttaaacattagagtgggttttgggataaatggggttgagattaggagccaggtagacaaactacaagattaggctcctggcgagaacggcagagactacgagctaaggcatcggcgttaatacgttagatttcggggatttgaggactttgattttgatggactcatgcgacttaagctactccacaaccatgggcagccaggcgttatcgctagcgaaaccagcaccaccacccacagcacctgcaccacccacgccaccgttatgtgcccggtaacccatacgcctctcgtgcgttttgggcaccggaatgggatgttggtaaactccagtgattgtctccatgcccaagcccatgccattctgttgagatttgggggaattctgcgggaatatacgctgctccactatgcgggactcttctgcgatggaactgactgtagccgccgcctccgccttgcgattcttctcgaagaaatcgataatggggtggtagttatagttaatcctcttgcccgacatctcgctgccaccaccgctggggaagatcgagctcactggatagactgccggcggttgtggtagtgacgtcgactgatcccgctcccactgagtggtgcgctcggtcgaaagggacgacgctgacccggtaaccactgctgtgttggtcgtcgtggtggctggtggtgcatagaagcggggtcgcgatttgctgccaccttgccggttgactggtgaagatggtggtgaggctgttggtggtgcgcctggtggtgcgatggcacctgcttgatgggcatgggcggcatgggcagaggaggcgctggagaggccagcactggcgctgaaaccggagacaaagccggatcccggactaagggcagctgttcccgttcgggctggtagacttgtggtctgtggaaatcgtaggcggacggcagctcctcctgcgggcgatggtactgaagatgatgatgctgatgatgttgcggtggtgggggctgtgtgggtggaggcataaatacgcttgcgattcagcgggatacgcggcttctctgcaccgccgtttggtgggccagcgaataggtttacctcttggtccgaatgcgtctcgcttggcgccaaatccaagtccagacgcgcctctgaatgctgcggccgccggcggctcacctggctgtaatacttcttggaactggaactggagctcttgtatccgccatagcgatcttcgtcatcatcagggggactgagatatggacccacactgctgctaataccaggcagctttacgcgcaccttgttactgctggaatacagttcatttgtctcccgattgttgaaagagggatatcgaagacccagttcgtcctcctcgctctcttcggcatagtccagatcctcctcgtttatggtactatacccattatgactatgatttatgacaggagactggggagagtaatctttggcttgtatggaggagagcggtggaaactgctggcgataaccatccacttggcaggagcaacaggtgggcaccttaaaaatatccacatggagaccacgcactttgtcccaacttaatagacgatgatagttgtacacctgcgagcagtgggaacggtaagtctgcgccaagtaggaacaactctcgacgggattactgtttataaatgcaaagattgcaagttaataccatgttattcaagtgaaaaattattttcacccacctgcatttttccaatcttaaggtttgcgtgtgctgaccagtgttcactatgtacttccattctcctgaagctgacttggccttctggggtcgggcataacgtaccacgctctggcacatcccacctgcgctgccttcgtcttcacgcctttaatgtgaaaaaaaaaatgaaatattttaccaaaattcaccgtcgagcatttggctttttaattggtcttttcaaaactaatataaaagtatattcctacacattgttttttttcattggtttacgaaatataatgccaatataactgataaaagtgtaataaaatttgtgtgacctaatatattattttattatcataactttgtgaagaaaatgactttatgtggcttatgctcatatgattcaacgacaatttcaatatacaatttcgaaatgatcacgtttcctaaaacttttatagtcaaaacttatgttatgacatttattgtcagttatttgctatctttgatgatctttttcacttacctctttttgctcaggctgaagtcatcgaagtcatcactaaactccagattgttattgggcttgtcgtagaactcggccaatagagcggacatggcgtttttgtgacgcctaatgctgcccatgatctgttcactaagatttcaaaataatatatgcagtttccaacggtagacttcattcaacaactctaaccaaaaccaataactaagcataagtgcaagggaaagttgggcaagtgtgattcataaattaaagttttattatggctaaaattcggactaaactagagctaaggactatggaccggaaccaggaccctgggagtaccgctcaccaactagctacgggaatcttacagcggatagtcgtcggttcggatgcacatgttgctggtgaatcgttcgcatttcttgttgggtggtgtaaccacgggtttatgggaactggcggcggtcttcggtcttccccttaaggaggatgtgactctctttcgtttgatgggagatccagatttttgaccaggcagtggtcttttccccagtcggtaacgtggtccagcgatgagttcctctggacttggtagtggttcctcagtctcctcggcgctgtttctttgcagatctaatcgctcatcagcgctcagggggatttccgtgccattaagaccagcaaaagccagatcctccacctcagagtatgactggccaccattggaggaggccatcttctcctcctcctggctacttggctgttgaaaagctgtggtattcagcttgatggtacgtccagcaatgccacccaaaagttgctgctcggtcacagaagcaggcacggatcgggtcaatttgtgaacaaactcgtttgccgatcgtcgaactctttgaccatgattttctggtttaaaagtcttggttttgttatcatgaagatcacctgtcagggcctcattgatcatctgaggatcaagcacttctgaccccatctcatcaaagaagtcctctagagactccaattgcacctcctcagtagagaccttttttggctcaacttccacagcaatggtgcccaattggtcatcctgttgggactcttctggagtcaaatcatcttcacgacgattgatgggagtatggtaaagggcagatgaagccagatcagaacccagattgatgtacttgcgggtagagctctttatgagatttgcgatgtcgaacactatgggcaaaagcagctttttttcattgccaaacatcatgcgaacctgattaaattagaaaaatcattagccagtttttttttttaatgcaatgtaatgtaaaataatatttttttaaaaacgttctcaaacacacctgttcaaactttagttcgtgccccttttttgcattcatctgagccgagatcaaagcggaaagagccaggcgctgttgagaagatagcattcttaaaatgggcaaaacttcggcgaacttctggcgcaatccctcatccgccaaggctttggccagagcgtttcttaaaaccctttctcgccaatcgaaaggtggtaattgtttctccggctccggttcatccagatctacgctaaagtccagcatattcgactccaacttcttttcggcctgctccgccttttttgcctcctccagatcatccagctgccagtcctccatagcagcatcatttgaatccgcaaaatcaaagtccatcagctcatcgtcggcggagttcccactgaccagatccagatagagcacacaatagagcagagcccagaaaaggcagccgaaggcgcggccagctttcattttcactctggctttattttcttggctttgtttttaattgcagtcgtctgcgaatgacaaaaggcaaaggaaagttaaagcgagggggcggtcactgctggttattaagttggatttaattttccgaaatatcagatgaatgtcgtcttattaattgtttatttatgactatagtgcacctcagacgacactcgcacgctttcaaaaaaaaaaacagtttatggcttattcttagacgggttcaatttgtcttggcaaattcaaaaccattcatatttttggctttccatcgaaagcaagagtcattaacatgagcgtaaactattacgaccgtgcagcaagagtcataacagtcatcttggccaggctattacagcagcacagtcgtctccggctttaggtaatcgcactcagccatcggcgtcgtcatcatgatcttcactgtcatctcagttgactgcccaacaaggcgtgaagcaccgaagctgctctggttgttgctatttttaccattttaatgtgtattttcgcgcacggggttatgactcctgactaaactggccgttttgcggtaatatggcatcccatccaaaggtcgggtgattgatttgactgcgctttagcttcctatcatcatgatgaagacatttgtcaggctaaaagagctcttccctcttccctatgaacttggttttctcttcttgtctatgcaaatgtgttcagcacaaaggaaagtctttctttcattttgttcgttatttatatagtcgactaccccaaggagccgacaaatctgaatgctaacaacacccaagccaggaaaactcctccgaggcaatggctataccagctgcatcgatgttatgaccttttgtgcagatgaaaagtgaaaatttggctgcagcagcggcaaacagttgacagtttagaaaaggcagccaaggccagcatgaaaacttatggcggacgtgggctagagaagattgtccaacgattcacg

SEQ ID NO: 42899 - DNA, 3129 bp, DROSOPHILA
atgaaagctggccgcgccttcggctgccttttctgggctctgctctattgtgtgctctatctggatctggtcagtgggaactccgccgacgatgagctgatggactttgattttgcggattcaaatgatgctgctatggaggactggcagctggatgatctggaggaggcaaaaaaggcggagcaggccgaaaagaagttggagtcgaatatgctggactttagcgtagatctggatgaaccggagccggagaaacaattaccacctttcgattggcgagaaagggttttaagaaacgctctggccaaagccttggcggatgagggattgcgccagaagttcgccgaagttttgcccattttaagaatgctatcttctcaacagcgcctggctctttccgctttgatctcggctcagatgaatgcaaaaaaggggcacgaactaaagtttgaacaggttcgcatgatgtttggcaatgaaaaaaagctgcttttgcccatagtgttcgacatcgcaaatctcataaagagctctacccgcaagtacatcaatctgggttctgatctggcttcatctgccctttaccatactcccatcaatcgtcgtgaagatgatttgactccagaagagtcccaacaggatgaccaattgggcaccattgctgtggaagttgagccaaaaaaggtctctactgaggaggtgcaattggagtctctagaggacttctttgatgagatggggtcagaagtgcttgatcctcagatgatcaatgaggccctgacaggtgatcttcatgataacaaaaccaagacttttaaaccagaaaatcatggtcaaagagttcgacgatcggcaaacgagtttgttcacaaattgacccgatccgtgcctgcttctgtgaccgagcagcaacttttgggtggcattgctggacgtaccatcaagctgaataccacagcttttcaacagccaagtagccaggaggaggagaagatggcctcctccaatggtggccagtcatactctgaggtggaggatctggcttttgctggtcttaatggcacggaaatccccctgagcgctgatgagcgattagatctgcaaagaaacagcgccgaggagactgaggaaccactaccaagtccagaggaactcatcgctggaccacgttaccgactggggaaaagaccactgcctggtcaaaaatctggatctcccatcaaacgaaagagagtcacatcctccttaaggggaagaccgaagaccgccgccagttcccataaacccgtggttacaccacccaacaagaaatgcgaacgattcaccagcaacatgtgcatccgaaccgacgactatccgcttgaacagatcatgggcagcattaggcgtcacaaaaacgccatgtccgctctattggccgagttctacgacaagcccaataacaatctggagtttagtgatgacttcgatgacttcagcctgagcaaaaagaggcgtgaagacgaaggcagcgcaggtgggatgtgccagagcgtggtacgttatgcccgaccccagaaggccaagtcagcttcaggagaatggaagtacatagtgaacactggtcagcacacgcaaaccttaagattggaaaaatgcagtaatcccgtcgagagttgttcctacttggcgcagacttaccgttcccactgctcgcaggtgtacaactatcatcgtctattaagttgggacaaagtgcgtggtctccatgtggatatttttaaggtgcccacctgttgctcctgccaagtggatggttatcgccagcagtttccaccgctctcctccatacaagccaaagattactctccccagtctcctgtcataaatcatagtcataatgggtatagtaccataaacgaggaggatctggactatgccgaagagagcgaggaggacgaactgggtcttcgatatccctctttcaacaatcgggagacaaatgaactgtattccagcagtaacaaggtgcgcgtaaagctgcctggtattagcagcagtgtgggtccatatctcagtccccctgatgatgacgaagatcgctatggcggatacaagagctccagttccagttccaagaagtattacagccaggtgagccgccggcggccgcagcattcagaggcgcgtctggacttggatttggcgccaagcgagacgcattcggaccaagaggtaaacctattcgctggcccaccaaacggcggtgcagagaagccgcgtatcccgctgaatcgcaagcgtatttatgcctccacccacacagcccccaccaccgcaacatcatcagcatcatcatcttcagtaccatcgcccgcaggaggagctgccgtccgcctacgatttccacagaccacaagtctaccagcccgaacgggaacagctgcccttagtccgggatccggctttgtctccggtttcagcgccagtgctggcctctccagcgcctcctctgcccatgccgcccatgcccatcaagcaggtgccatcgcaccaccaggcgcaccaccaacagcctcaccaccatcttcaccagtcaaccggcaaggtggcagcaaatcgcgaccccgcttctatgcaccaccagccaccacgacgaccaacacagcagtggttaccgggtcagcgtcgtccctttcgaccgagcgcaccactcagtgggagcgggatcagtcgacgtcactaccacaaccgccggcagtctatccagtgagctcgatcttccccagcggtggtggcagcgagatgtcgggcaagaggattaactataactaccaccccattatcgatttcttcgagaagaatcgcaaggcggaggcggcggctacagtcagttccatcgcagaagagtcccgcatagtggagcagcgtatattcccgcagaattcccccaaatctcaacagaatggcatgggcttgggcatggagacaatcactggagtttaccaacatcccattccggtgcccaaaacgcacgagaggcgtatgggttaccgggcacataacggtggcgtgggtggtgcaggtgctgtgggtggtggtgctggtttcgctagcgataacgcctggctgcccatggttgtggagtag

SEQ ID NO: 42900 - protein, 1042 aa, DROSOPHILA
MKAGRAFGCLFWALLYCVLYLDLVSGNSADDELMDFDFADSNDAAMEDWQLDDLEEAKKAEQAEKKLESNMLDFSVDLDEPEPEKQLPPFDWRERVLRNALAKALADEGLRQKFAEVLPILRMLSSQQRLALSALISAQMNAKKGHELKFEQVRMMFGNEKKLLLPIVFDIANLIKSSTRKYINLGSDLASSALYHTPINRREDDLTPEESQQDDQLGTIAVEVEPKKVSTEEVQLESLEDFFDEMGSEVLDPQMINEALTGDLHDNKTKTFKPENHGQRVRRSANEFVHKLTRSVPASVTEQQLLGGIAGRTIKLNTTAFQQPSSQEEEKMASSNGGQSYSEVEDLAFAGLNGTEIPLSADERLDLQRNSAEETEEPLPSPEELIAGPRYRLGKRPLPGQKSGSPIKRKRVTSSLRGRPKTAASSHKPVVTPPNKKCERFTSNMCIRTDDYPLEQIMGSIRRHKNAMSALLAEFYDKPNNNLEFSDDFDDFSLSKKRREDEGSAGGMCQSVVRYARPQKAKSASGEWKYIVNTGQHTQTLRLEKCSNPVESCSYLAQTYRSHCSQVYNYHRLLSWDKVRGLHVDIFKVPTCCSCQVDGYRQQFPPLSSIQAKDYSPQSPVINHSHNGYSTINEEDLDYAEESEEDELGLRYPSFNNRETNELYSSSNKVRVKLPGISSSVGPYLSPPDDDEDRYGGYKSSSSSSKKYYSQVSRRRPQHSEARLDLDLAPSETHSDQEVNLFAGPPNGGAEKPRIPLNRKRIYASTHTAPTTATSSASSSSVPSPAGGAAVRLRFPQTTSLPARTGTAALSPGSGFVSGFSASAGLSSASSAHAAHAHQAGAIAPPGAPPTASPPSSPVNRQGGSKSRPRFYAPPATTTTNTAVVTGSASSLSTERTTQWERDQSTSLPQPPAVYPVSSIFPSGGGSEMSGKRINYNYHPIIDFFEKNRKAEAAATVSSIAEESRIVEQRIFPQNSPKSQQNGMGLGMETITGVYQHPIPVPKTHERRMGYRAHNGGVGGAGAVGGGAGFASDNAWLPMVVE

SEQ ID NO: 42901 - DNA, 8429 bp, DROSOPHILA
tgctcctcggtccgtctgtgtgacgaatcgctgcactggaggacactgagatcggatcccgatggcgattactgcggtttcttcactctttttccacttccactgctgctgctgctttgcgtgacattttctctctgcgcccctctgccgacgaactctctttctggcgctgctgctccgtgaatttgcaaggtcgcgcgctctgctgcggttatggggcgaacagtgggctggttctttaatgatacgccgaggattgctcgcttttaattgttttaaaactttgttttatgcttttttttgcaatgtaaatgtactgtacgattcgtgccgtgcgaatgccaacaatcgttatcgttcgctgtgaatggcattgtcgccgttccgtctgccgttagtggtgtgtgcacattggctgcccatgcactgtgtgctgttaggcgcgcgctgttaacgctctgttagccgcccaacagtcatttgaaaattcaaaatatgcaattcaaaatctgaaattttgcagtttatttcccactttcggtgaatgaatagacagactttgtaggattgtttacttatgtttaataggtatattattaaggattagtctctaccaactaagcgttaagaatacaaaattttgtcacttgtacgtatacactttgtcatacacatttatccatatatatgtaaatattcatatatatatatatataattatatccgcgcgctaaccgttatcaatattcaataaaatcattatatcagaaacttgtaatacactcgcagttgaagaatttccgttcacatcagcatgagatctttaaacgttaattgtgtagtttgaaatatttataataaaaacagctcttgagttgaatcgttgaggatcaggggttgcttttgggttgggttgtgttgagttctgttgggaattgggatcgggatcgggatcgggttgtgtgcgggttggtgggtgatttgctcgcttgctcctcctctactccttgtgcccgccctgcagcttcttccaagtttcgcccagcgccttggcaaagtggtcgtccaccgaggcttcagtcttggtgaatatcgagatattcgtggacgaggtgggcgaagcgggcggcgtctgcgtcgaggaggcagccacggccgccagtcccggttcagccttcacccgaatgatggccggcatgctgggcgtgggcgtgggaatctgcgacggcgtcggattcggagttggtgtcggtgtcaaagtcggcgccacaacggtggttccggctattccgtaagccggcggtggaggcggtggtgtgttgtatctcggcggcgtgtggtgtggcgtgtccaggatccgcctgcccgccaccgctgcctccatcacctggctgacggccgtgggtagcgctggtgccgatcccgtggccgaaggtggcggcgatggcggcgtttgggtgcgatgcagtgccagcgacaggggaagcggttcctcctgcggcggcggcagttccggctgcagcgattcgggctccagaatgacccatcccgacttggccagcggcgagcgttgctgctggtagtgctgcgatgccgctgtgctggttgatgaaggcagtccgtaggccagtggcgaaacctgctgcttaggtgtaccacttggcgagggcgtgggtgttggcgtaggcgtcggtgacttcttggcgaacagggcagcatagttctcgcccagtgagcgtcggaagtgctcgtcaatgtcgcacatcgccatatctgcaaggcaaatcaaagcatcaggttagtatgatcgttgacactaatgtgcatatatgacttctcacctgtagagtgggcctgctccggtggttctcgcttgggtggagcctgggtaatgacgctgggtcgactgttggccgcgtagttggtcccaggcaagggttcgcgatagggtggcggcggtgaggctctctgcttcagagctcccgtcgtcaccgacatgtcaatgggactgtccatgtcgcgatcctctcgatcccgctcccgttcccgctccctctcgctgttgcctgcctcgtgcggctggtatccggcactacgctgacgccgctcgcgtcgccatttggtggtggtcagcaccttggacgtcgcacgcatctctgcaaggagaaaaaaaaagaaacatcaagagtcaaaaacggttttcaggaaaacgagctatctgttttggccatctttttggctagccctctgaatagtaatagtccatatgtccatattatagacaaaaatcgaatttcaattaaaacccataaatttgctgtggctttgcggttgatttgggttttgtctggctagcgattcaccaatgctcgttgcggtttacgtgtctgtcgtcttggcttcgattatgcggtcgatgagtgggcgtaatgaatcagttggagttgaggcgaggctgactctacaaaggttctcctccacccgatcgcctgcctgcgtctatgtatccaaatctctacccccccctggcccgctctgtcctgcaagtttgttgcctaagtctttcgtttttttgaatgaacctctgccaaaagctgcaaagtcgcggagcggcagagagcggcaagagcgggcaggaggaagagtttaaggcagcacagaaattatgcacaagaagacgtagccgtcatcggcaaaaaatatgaataaaaataaaacaaaaaaaacggcacacacacactcgaacaaataaataataacaacagaaaaagcatatacaatcgaaactccaaggcaccaacaaaattggttacgaaaactcgtttggtctacgctctttttcgagttcgcctgggttgtatgtgtgtgtgtgtgtgtgtattaaagtctgggcctggcctacactgagcgaaacgcaggaacgtgcctggcctgccaatgggcgattgaccgagctgccggcgtgggaagcggccaaaacggagcgtgggcatcccgtcgggatgaaagatccatctgctccaggcgctcagtgtagctgctgctgcagcttgccaggaaaccaagtttataaataaagcaaaaggctggcagcgggaagccaggtcccagaacccagtttctcggccgatatcgaaggggcaggcaaaccagtcgggcgacttctgcacatttcgagcagcgcagagaaccccgtttggaggaggagtagctgcagtcccaggaacccaggcatgaatgaatgaatgaatggctggattgggatggaggcggttggcgttggcggaggagcaggagcaggaggagtggtaggagcaggcgggagcgttgtcctgtttttggcaacgtcactgcggggctgccatatattactacctctgcgagtccaaccaaaccggcgaggcagaggagcaccagtaagaggagccaagaaactggtctgtcccgagtggagcactgggcgcagaggatgacgaggaggtggaggaggagggcggaggcagtgaagttggagttgcaggccaagaggcattaaaaaccaacaaacacggaggctgggagcaaacttgggcttggactcgggctcgggctcgggctcaagcggatgatgatggggatgatgataataataaagaaacattcaaattttattgcacatttccggtcgtcggacgtcgccgtctgttgggggatcggcggttcgacagcgaaaacaacaaccacaacaacgaagacgaaaacgacaacgatggagcatggagcatggagcatggaagttggaacattaagctttctttttgaggctccccctcttttgcggattgtggtctgcagctccctatctcaccttcgccgccaccgcattttcagcatcctctcggcattgtttatttgttctgctgccagcgttttaatcatttctgtatcggctaattggcgataaaggggaagtcgattgaatggcaggccgtttcgaaattaagggggagttcgtaaaagggagctcgaaatggggttacatcgatgatataagcaagggacagtcgtgggatccaggcgatgtaggatgtagtgacagttagcttgtactccgaacagaaaaatcaaacgatttaaaggtagaaaccaggttttggcatttgtaaaatgaattgaagccataaagaacgacttgaataaacaataaaaaaacaaccgcaaagttgaataattaagaaaccaatctatacattcgtatttaaggttttgtcatcaggtcttctattctataattcgtataagtatataatcgatacagggttatttcgttagtttttgatacccatttatttttatagagatgcatataaatggtaaatttatctgccttcatttcaatgttttgtggatagcaattacaaggaaagcattacttccctaatattcctataaacaacaaatttagcaaataatagacttttcaattgataatgttagatgttaaaataaatccaagtattttagaaactttgcccataacaattagagtacattattattgtacaaaaaaatcgaaccattatttcaggcgaaacatttcacaatttccggtaacggtgggccaatctcaaaacttcttcaccgctgaggtgatatatcagctgtctggcgagatttgaaagcgccggcccagtgagatcccaatatctggttccgacccgaagggaacgcgcgaaagagaggggaggagaggcggaaagagagagacggcgcgagagtgacaaaactcaagcagacttgcatgcttataagttttggcctgttcggagtgtaagattgtactacaaatggcttcaaagcaatagcaatagcaatgggaacagcattttgtggcttatgcaaacaagttgttgctgctctggttgttgtagcttttgtagctttgtgtacacatttatttttccatcatcgtcgccgccgccaccgtcaccgccatcgcaggcgtttttcattatttatatattttacgtttatttttctttactcgcgccggctagtgagtcatgcccgtaaccacgtatccgatccccaagcccccgatccctgccagactttccgctatacccgcaccgcattacccgctggccgagttgattgcaaatctggttttaatatgtcaacaaattaacaaaagcaaagcaaaaccgagtcgagccaagcacagcggctccaagccccaaaccaagccccccccccccccttcccaatccaagttccacctcatcgtttttattttttttttatggaggtttaatgtttaaacaggcgctcattttttgctctttctcgggctgctctttttttccagtgatttttgtgtttgcctggcgtcgccatgtaattgaaagcatttgtgtgatttgtgcaatgtcgccaattaacgcggtggaactggagtgtgagtgtgtttgtctgctcgtttgccaattcgagcccgaagccaatcgttggcgacgggggagcgcagtaaaagtgttgccaatttcattaccaattttccagttggcacaagccaagtagagacgccatcgatacgctcttgcagccggcgtgaccgattgcgttagctgccgttgccaatctgcgtctgagtcccaatcccaatcgtcatcacgttcacgtccacgtcctggccacacgccgcccactaactgataaagcgaggcttagcgaatcgcttccgatatcccattcatgagcgcagtgggtgagtgattatcgtggccatgtggccaaaggaaagggcacgttcgccgatccattgaacttcagcaccgatcaggcgaatgagtgtagcctccacgtgagcagcaggtgcagcaacgtggtcttcgcttgtcctgctcttcgctgcactttgcctgcctccatccacccaagataattgcgaacatattatgtggtaacctagaaccacacgtgttgtttacttcaaggaacagtcatgccaagaagtggaaagagtttgaatgttcattcggtgatatacgtatactatttaacaagatgcttgtaagatttcaatactctggtctgcaaagagtttatataaacaatattgtctttgttttggcttcttatttgttcggtttttaaagctgcaattaaagatcttgttgtaatgagatttcaactagaaatcaggtaacaagaacatcccctatgctgtcataggaaactttgggttaaatggaaagaactttgtgtttttttatgctggattttatacttaaagattcaaagcttcgttgaaatgtgtaattaaacatctttagatgtttctaaatgtttctactatagtttaaaattttcatttagttaaaaactgacaggtggtttaaagctagaatgacactgacagggtgttacctctttcaatttgaaatcgacaatttttaagagggtttatactagagtttgaattcatttaagcacactgttgttgataaacaattgttacaaacaattctgatatttatttacctaaaattgaagcgtaccatttaccgacaggatggctattaataatcgttataataaatcgtaacaacgttgtagaaccctgaacatttagactttacttcccagaagaagcacggaataaattaaaggttatgataagacaaattagtgaaactacacgaatccgaaaaatggaattacgaagaaggggatctcacatttgaaagaatacaaacaaactatcccctgccattgtggcctcatgtgcaatcttcctaatgaattgtaagcaagtttcactggcaagatcacccgtatgtgacagtttcaacctttcagtcccccgaggtcagtcagtcgggggattttcgctagtcgatttctttgaagtcgccctgtcaaacgaacctgagtgcaactgcaactgctgctgctgctgcctgtagagctggtgatgcatggcggccgcctgctggagatctcgccatggctgccagagcagactgttggccatggaggaggcgttaggatcggcgttcgcctgcggatgcatctgctgattgccggactccgcctgcaacgcatgcagctgctccagctgctgaggatgctggacattgtagaacatggccctctggctggccagtgcttgttggtccgccagagcagcggccgctcgggcagtagccacctgggccaacgaaccgtgcgaactggccgcggacgagacaatggaggaagtggagggtccactcgagcaggatgcagatgagatggaggccgtcgaggaggcggatgaggcggatgaggcgggagatgttgctgtagcccccccagcggtttcggcgaccaaacgctggatctccttgtggtagtagtaatcctcgaaggcatccagtaagcaacgataatctaagcggagagccattctatgcgaacttgatggattctcaattagctgcgctatctagccacttccttcttctcgatccaaatctctgggggtatcgatcctcccacaccgcagtcgccgccgaaaaaccgactcagctgattcacaaatcactacgccttggccgggagttgggggcggtatctatcaatcggtatcagttgaagtacttctcggatgctggggagcggcactcttttctttttttcttttattatttatttgtttttctttcccttccagtttatgattacttttttgcgctcggcggcagatacagatacacgaatgtgcgcacacaaaacgagccgcaagtcgcgactatagatacagatacaatctgtttctgtttgtctgttggtttttttttttttcttctgcgatttggttttttttttttgcgcgaaccgcgactcgggttacagtctctcgccagttgaaacggagactttggctctgctccggcgacgtgagcctcgagtcgacatttagcaaaataaaaatagcacgctcttttttctggctttttctgccttttgttgttacggcgactctgtctccgactctgtcgtctctgggttatatgtgtttcttttccgagtaatgatttgcatagaaatcgacaaatcgctgactgaacttgagcgccagttttcgctttcagagaccgacgaacagaacggggcggcacacacgaaccgatctggacgcacgttccacgccacaaatcgtagtacgaatagcaaggtatcggctatagctagctgtcagctatatagcattaggaactgggcaactgtgcaactgagcaactgagcaacgcgacaccgaactggcggcttccacggccaaactcaaactgatcgtcggcgagcggcgacttgaagattgcgactggggcttgctgtattattattattatatagggggctttcgaagctccgaagccgcggccgagtcttctgtcttccgtctt

SEQ ID NO: 42902 - DNA, 1608 bp, DROSOPHILA
atggctctccgcttagattatcgttgcttactggatgccttcgaggattactactaccacaaggagatccagcgtttggtcgccgaaaccgctgggggggctacagcaacatctcccgcctcatccgcctcatccgcctcctcgacggcctccatctcatctgcatcctgctcgagtggaccctccacttcctccattgtctcgtccgcggccagttcgcacggttcgttggcccaggtggctactgcccgagcggccgctgctctggcggaccaacaagcactggccagccagagggccatgttctacaatgtccagcatcctcagcagctggagcagctgcatgcgttgcaggcggagtccggcaatcagcagatgcatccgcaggcgaacgccgatcctaacgcctcctccatggccaacagtctgctctggcagccatggcgagatctccagcaggcggccgccatgcatcaccagctctacaggcagcagcagcagcagttgcagttgcactcagagatgcgtgcgacgtccaaggtgctgaccaccaccaaatggcgacgcgagcggcgtcagcgtagtgccggataccagccgcacgaggcaggcaacagcgagagggagcgggaacgggagcgggatcgagaggatcgcgacatggacagtcccattgacatgtcggtgacgacgggagctctgaagcagagagcctcaccgccgccaccctatcgcgaacccttgcctgggaccaactacgcggccaacagtcgacccagcgtcattacccaggctccacccaagcgagaaccaccggagcaggcccactctacagatatggcgatgtgcgacattgacgagcacttccgacgctcactgggcgagaactatgctgccctgttcgccaagaagtcaccgacgcctacgccaacacccacgccctcgccaagtggtacacctaagcagcaggtttcgccactggcctacggactgccttcatcaaccagcacagcggcatcgcagcactaccagcagcaacgctcgccgctggccaagtcgggatgggtcattctggagcccgaatcgctgcagccggaactgccgccgccgcaggaggaaccgcttcccctgtcgctggcactgcatcgcacccaaacgccgccatcgccgccaccttcggccacgggatcggcaccagcgctacccacggccgtcagccaggtgatggaggcagcggtggcgggcaggcggatcctggacacgccacaccacacgccgccgagatacaacacaccaccgcctccaccgccggcttacggaatagccggaaccaccgttgtggcgccgactttgacaccgacaccaactccgaatccgacgccgtcgcagattcccacgcccacgcccagcatgccggccatcattcgggtgaaggctgaaccgggactggcggccgtggctgcctcctcgacgcagacgccgcccgcttcgcccacctcgtccacgaatatctcgatattcaccaagactgaagcctcggtggacgaccactttgccaaggcgctgggcgaaacttggaagaagctgcagggcgggcacaaggagtag

SEQ ID NO: 42903 - protein, 535 aa, DROSOPHILA
MALRLDYRCLLDAFEDYYYHKEIQRLVAETAGGATATSPASSASSASSTASISSASCSSGPSTSSIVSSAASSHGSLAQVATARAAAALADQQALASQRAMFYNVQHPQQLEQLHALQAESGNQQMHPQANADPNASSMANSLLWQPWRDLQQAAAMHHQLYRQQQQQLQLHSEMRATSKVLTTTKWRRERRQRSAGYQPHEAGNSERERERERDREDRDMDSPIDMSVTTGALKQRASPPPPYREPLPGTNYAANSRPSVITQAPPKREPPEQAHSTDMAMCDIDEHFRRSLGENYAALFAKKSPTPTPTPTPSPSGTPKQQVSPLAYGLPSSTSTAASQHYQQQRSPLAKSGWVILEPESLQPELPPPQEEPLPLSLALHRTQTPPSPPPSATGSAPALPTAVSQVMEAAVAGRRILDTPHHTPPRYNTPPPPPPAYGIAGTTVVAPTLTPTPTPNPTPSQIPTPTPSMPAIIRVKAEPGLAAVAASSTQTPPASPTSSTNISIFTKTEASVDDHFAKALGETWKKLQGGHKE

SEQ ID NO: 42904 - DNA, 4381 bp, DROSOPHILA
aaagctggagaaaaccttcaaagagaaaggctttctcatccaaacccagcagcttcaatccgccgaaggtgctacctattgcaaatttagacagctaaagaagttcacgcgctaccttttccgcaactggaaggatcacatacccgagagcgatctggccaagcaccaaaatgcctcgcgggaggataggctgccaaatctggaaacccaaaccgccaaccagacgacatagagctgcggccaggacattcaggaaacatccacacacagcactgccaaagatttaagtttaagatcagctaatggccggcccagcttcggttgcggttgccagttgagggtggagaacagcaacccatgccgattccgtccatgcgggctgtccaacaacgcgatcaatgatcctcagccacgcttcctagtcgttcatcagtttttttagtgcctaataaaatgttattgttaacaaataaactcaatgtttaaccatatgcaaatgtatattgtttggttgtaaaaggcatcgtagtatgtattttacaaaatatccgtcaatacagttatgtgttagtacaaaagataaactccaaaatgggcgataagtctataggggttatgctcgctctcaaggtcgtttcaatgccattgcgaatacttcttgttatcatcgttatatgcttatttagaagatgtcattacatcccgtttccagattagcctaaatgttagttacagataatataaaaatttccaaaatgtttgctggtatgcttaggtcgacgaaagaattttgactcgaattcattcgaaagatgtttggaagtttgggcgtggccttgataagataaattctcactaatattgtcaattttgtggatttggttgcataattggttcaggtggcagttcattcagtttggggatccttggccaggttttgggcttacaactaaaaaacatatttgctttcaatcgatttgtgctcctttcgacttcgtctttagttcgaactcatggagctctcatgctccttagccgtatcagctagatatgtctccggcacactggcattcatgggacacacgtactccgtccagtctacgtcactctggctcttcgagctcttgcgacgctttaacgaaaactgtgtgcgtttcaccggcttcagcttagctgtaatgcttagcggttggtacccgggtgccgattcggcatctcgcttactcaagatcactggccgaccgactagctccttaaagtgcatggccaggtggcgacgcagcagggacttgctcggtggtatcgacagcaggtcggcaagcaagtcagcattgaaacgcggttcataaagcatcagagccccgtggacaccagcaccacgcagattgggcgtgtattcagacaggtcgatggtctgcagccatcccataatgcgatgcgctgtccacagctccacattgtctctgtcgggagtggctgcggcttcatcttcactgacaactttaatggagcgtcgaattagaccttccgcgttccacgataagcggcgcatgcataagattcccgctcgcaaggaggctatgtgcaaacaagagctgacgtgcaattgggagaggtcctcgagggtgagacgatgcagcattcgaccgtcaatcttggcctgcataaagtaatctttatactgtggcaagccgatgtcatccagccagcgtagaacccatgtcacatccaagctggatgccttcagtgtcaggtcatcaaactccttcccagttaggtcgtcgatggccaacaagatttttttccgatgaagtggcatctttaggtttagctctcgttcgatgtcgacaggcgaggcggtgaagaacgacactgatggattggcattcaaccactttctgtaggcggaaattgtatttagtaactgggttcttcttggattttgatgacaaaacttaccggcaattgtcctcatagcagcctagacccatgtatgccaaccaattgcacacctcctgcgctccccaggttgtccaatgtttttcattctcaccgaacaacggagtctgagcactccactcaattcgaccgcctgccgtagctcgggctcctcctcgtcgaaactcgggctctgcctgctccaaggcggtcagctcgcagttgctgctgttgctgcgtcgtagcttaccaagtatgttgcgcaagccacgggcagatctttccctcagctttggtgagggtgtaaactgcgacataaagctggaagtcattgcatcctccgcttgatgatgattgtcatcaatcaaaatgtgttcgttcgaagcaaaggccacgtttcgctgcttgccgctgctgttggcattgacgtctaaggcacgattgttattgttgttcacaaacttgccatgcgatcttggcaggctgtggaactgcggtttgatttggtgccgcagtgcagagggcggtgtcttgggcgatcccataaaggccttctgattaatgttgctcaaactgccgtaaggaatattggcggaaatggcgctacctccatcgttagcctgctctaatgcagtacggtgcagttttagttcacttaaggcactcattagctccagcttttgcgtctcgagggcggaactagaaatcatctgtcgttgcagttgctcttccttggtacacaactgctggctcttttccgttatcagaccctccagctcgataatcttgtccgcttgttctgacactcgttccgccagcatctgatactgcagggctaagccctccttatcccgttgcaggcgacgcatacgctcgtcggaatcctgacgaggtatgtgcgtctccagccagtcgctgataatggccgccgtgacaggatccggtgctggagcagccagtccgacctaaagtgataagcgtaagtgtaagccctccgtttctagaccttatcatagtcagtgtgactcacctgttgcagggcgagagccaaagtcttagctgttgacaaaacattagtggccgaaattaagttgcgttcgctgagtgtcagggaagaccctgctccggatatagaaacggatcccgcctgtgtcgcggtactcgatataaggccgtccatttgctgtaatgctgcctcgagcattttgctgccctccgccacagtcgccatgaagtccaaatcaaagtctcgctaatcccgggtgatcgatgtgtggtgtgcttattgcgcgactagtgcattgttatgtaagcaggtcaggcagggcacgtcattttgcactggtttaggggaaaatggcatttatggttattaatttcagcactaattggggaaaactatcacgaaaatagaagctgctgcaccgttctgcttcttcttctcgcacaccagcccagccacttatcgatagtcagcgaacgcagaattgtgtgtaggagcaacatccgatagtttgctagatggtctaaagtctacaaaacaaattttaaaacaaaattaattttaagtaacgtataaaaatgcctaaacacattttaattacattttttggggacaaagtatgcaatatatctagatgtgtacagctatatttggttttccatacccgatatctactgtacaaaaaagataccatcactaataagcaggtggaacggtggagtcacgaaagatgtgtcatctccagccagagccacaacaaaacaaatattaaggataaaataacaaatatctgaaatgaatcgcttcgcttatgtggaggcccgtctgagtcccaatgaatccttcgtcagccgcgacaacagggtaaaaatatacgatggcgaccaaaaggtgagcagctagtgaattcgcacaatacgaaaccgggtctttattagactcaaatcctttcagacggactttgaagacggcgaagtggtgctcaccacacaccgactgttttggggtcgccctggagagattgcccgggccgccgtaacactttgcctgccactcagctatgtgatatccgtcagcgaagagactactgcctctaacttctttggccgcaagactcgcataatcatgcatctgcatcctccaacgtcggacaaaggacccggcccactggacaccagtcgcgccacccacatcaaactgtcgggcaagaatggcctgagtgtcgagttccacagtgccttgcgggagactctaaatgcccgcgtctgggaaatcctcttgaccagcgagatcatcatcaatggcgtggccagcagtccaaccttggagcctgccaacgacaggctggcccgcattcagaagaggacaggaattgggggcatcgaacggcatttggaggcaaaagccaaggccacggatgagaacatagcacttgccttt

SEQ ID NO: 42905 - DNA, 2255 bp, DROSOPHILA
agaagaagaagcagaacggtgcagcagcttctattttcgtgatagttttccccaattagtgctgaaattaataaccataaatgccattttcccctaaaccagtgcaaaatgacgtgccctgcctgacctgcttacataacaatgcactagtcgcgcaataagcacaccacacatcgatcacccgggattagcgagactttgatttggacttcatggcgactgtggcggagggcagcaaaatgctcgaggcagcattacagcaaatggacggccttatatcgagtaccgcgacacaggcgggatccgtttctatatccggagcagggtcttccctgacactcagcgaacgcaacttaatttcggccactaatgttttgtcaacagctaagactttggctctcgccctgcaacaggtcggactggctgctccagcaccggatcctgtcacggcggccattatcagcgactggctggagacgcacatacctcgtcaggattccgacgagcgtatgcgtcgcctgcaacgggataaggagggcttagccctgcagtatcagatgctggcggaacgagtgtcagaacaagcggacaagattatcgagctggagggtctgataacggaaaagagccagcagttgtgtaccaaggaagagcaactgcaacgacagatgatttctagttccgccctcgagacgcaaaagctggagctaatgagtgccttaagtgaactaaaactgcaccgtactgcattagagcaggctaacgatggaggtagcgccatttccgccaatattccttacggcagtttgagcaacattaatcagaaggcctttatgggatcgcccaagacaccgccctctgcactgcggcaccaaatcaaaccgcagttccacagcctgccaagatcgcatggcaagtttgtgaacaacaataacaatcgtgccttagacgtcaatgccaacagcagcggcaagcagcgaaacgtggcctttgcttcgaacgaacacattttgattgatgacaatcatcatcaagcggaggatgcaatgacttccagctttatgtcgcagtttacaccctcaccaaagctgagggaaagatctgcccgtggcttgcgcaacatacttggtaagctacgacgcagcaacagcagcaactgcgagctgaccgccttggagcaggcagagcccgagtttcgacgaggaggagcccgagctacggcaggcggtcgaattgagtggagtgctcagactccgttgttcggtgagaatgaaaaacattggacaacctggggagcgcaggaggtgtgcaattggttggcatacatgggtctaggctgctatgaggacaattgccgaaagtggttgaatgccaatccatcagtgtcgttcttcaccgcctcgcctgtcgacatcgaacgagagctaaacctaaagatgccacttcatcggaaaaaaatcttgttggccatcgacgacctaactgggaaggagtttgatgacctgacactgaaggcatccagcttggatgtgacatgggttctacgctggctggatgacatcggcttgccacagtataaagattactttatgcaggccaagattgacggtcgaatgctgcatcgtctcaccctcgaggacctctcccaattgcacgtcagctcttgtttgcacatagcctccttgcgagcgggaatcttatgcatgcgccgcttatcgtggaacgcggaaggtctaattcgacgctccattaaagttgtcagtgaagatgaagccgcagccactcccgacagagacaatgtggagctgtggacagcgcatcgcattatgggatggctgcagaccatcgacctgtctgaatacacgcccaatctgcgtggtgctggtgtccacggggctctgatgctttatgaaccgcgtttcaatgctgacttgcttgccgacctgctgtcgataccaccgagcaagtccctgctgcgtcgccacctggccatgcactttaaggagctagtcggtcggccagtgatcttgagtaagcgagatgccgaatcggcacccgggtaccaaccgctaagcattacagctaagctgaagccggtgaaacgcacacagttttcgttaaagcgtcgcaagagctcgaagagccagagtgacgtagactggacggagtacgtgtgtcccatgaatgccagtgtgccggagacatatctagctgatacggctaaggagcatgagagctccatgagttcgaactaa

SEQ ID NO: 42906 - protein, 680 aa, DROSOPHILA
MATVAEGSKMLEAALQQMDGLISSTATQAGSVSISGAGSSLTLSERNLISATNVLSTAKTLALALQQVGLAAPAPDPVTAAIISDWLETHIPRQDSDERMRRLQRDKEGLALQYQMLAERVSEQADKIIELEGLITEKSQQLCTKEEQLQRQMISSSALETQKLELMSALSELKLHRTALEQANDGGSAISANIPYGSLSNINQKAFMGSPKTPPSALRHQIKPQFHSLPRSHGKFVNNNNNRALDVNANSSGKQRNVAFASNEHILIDDNHHQAEDAMTSSFMSQFTPSPKLRERSARGLRNILGKLRRSNSSNCELTALEQAEPEFRRGGARATAGGRIEWSAQTPLFGENEKHWTTWGAQEVCNWLAYMGLGCYEDNCRKWLNANPSVSFFTASPVDIERELNLKMPLHRKKILLAIDDLTGKEFDDLTLKASSLDVTWVLRWLDDIGLPQYKDYFMQAKIDGRMLHRLTLEDLSQLHVSSCLHIASLRAGILCMRRLSWNAEGLIRRSIKVVSEDEAAATPDRDNVELWTAHRIMGWLQTIDLSEYTPNLRGAGVHGALMLYEPRFNADLLADLLSIPPSKSLLRRHLAMHFKELVGRPVILSKRDAESAPGYQPLSITAKLKPVKRTQFSLKRRKSSKSQSDVDWTEYVCPMNASVPETYLADTAKEHESSMSSN

SEQ ID NO: 42907 - DNA, 5223 bp, DROSOPHILA
atcaagtacttacttatcatatttaacgttttcaagcggcggaacattttgagttcagacagacaaaagacagattaacttcaattagtaaactggtgcgagacggaaagatttccgtaaagatttgcataagaaattaagacttttatttggaaaatttaagtccaaactgacccacctcaacgtatgtaattggaacaggtgtctaacttttagaaatcgtagcaactatgaatgatatctcctttcttttaatcgtaatttcctcaagtaaccctcaagatacaagtacgcattttaacttaaatttttcaatcatttgtcgttttattcggtttacatataatttaaactaaccattaatatataatatatatgatatataacattgtataaattgaaaattttcttggaacctgcaagcaaattttacacaaatcattacattttgatcaattacttaaatgactaatgcaattgttaaatcgtttttataatatttccgtccgtctttttgcacagctgagtctgaacaccaaaaattaataacaatttctgttctgtaacgacaagttgagttaacaaaatgtaaccaggcataaacttttgaacaatttcaacttttacatacatatttcgatttgatttcattttgacacttgctcggactgtgcaacgctcagttggtattacaataaatataggggaatgtctaatatagacaaggatacaataaaaatcggggtccaaagtatgtactacgcatatatcgagaaaataacagttgcaaaaccttgattgatcgttatagttttcattatttctttcttatatggtaatacctgtaactgatccaattgggtccaaactaaagcaacgaaaataacaaaaatttcgcttaaaaattttctactgcaatttactcagtctcgtatgcaaaatagaaaattcagtttttgcttcccttgtgttacatatataattttttttttttttttttgcctaaggtcaaaaaatgcgttggtcaagcggggcaggttttcgttacttgattttttcgtcgtgcgctattgtttgtcggtaaacaaagtgccgtttgtagttgtacataactgcgaagttggtgtaaaaacgaagggctagataatgaaaaaggtagttgtaaattggtatcaagtggttctggcttttgtaaatggtagtgtattcgcaacgcggaaatgctgggcaaccattttaaaaaaaataggggtacagttgccttagattattgtagctgcaggctgctgtctcgctctctcgcgcaatcttcgtcttcgacagctttttctcttttctcctcgggttttctttgtttttgtttttgttcttactctttcaggtttcctttcttctgggttaggttacacatctgtatacatatatggcatttcgcgaatgctgcgggcaccgtccgcagtagattcgtctcgctcccactcacaccttgcagctttgcggggcggcaaggacggtcgactggctgtgattgtgggtgtgctccagctcatgctcgtgctcgtgcatgtcctcctcgtcctcgcagatgctgtcatggtgcttcctttgctcccgcttgcgcatgtagttgatgagcggccgcttcttgtgctccttgcagaatgggcagtccttgcgcatctgcttctcggactttatctgcttgcacttttctgcaatgggagcaatgtgataggtcaccggttagtgaaggtcggcactgaatgttcaccctcgtctgttgtttcccgcattcgcttccactctgccttttagcctacgtgcccttctgggccgtcgaacagctgatttgactacgtgacgtcgctgcgtctacgttcacgacgtcacgtcgccaccgatggcgcccctccccacgctcgcacaatttttcccgctactcgacgtgtgaccctgtgacggaggcagctatatatttaatattatcatgcactggattttagaaacctattttaaaaagttgaatctatctaatctttggttttaatgaaaacattgttgtctttcgacgactgtaacacaactactacattgagcacaactgtacttacagcttgtgtgcttttgtgacctgcctccgttaattaaaccattgctttgattgctcaattgaccgtgttaaaagctaaacggttattattgattaaagcccagccgatccatgaggaaagtctatttatagccgccgataagcgaccttgcataatctctaaatgtgttccacactgggggaaaaaagtgctttataaactggatatttacacacatatgcatgctaccattcaaatacgaattgagttgtgtatgtacagacatgtgaatctaaagtttaaagtaagctagatatttgccttgcataatttttcacttgttttttttttatttctctgcaacccgataatgcactacgcgtatatgtatactatatggacgaaaacagcacgaaggtttaacatttacacacctcagtttcgttattgcgcttcagttttggcactcaaacacaatgaaaccctgctttgtttgttcttccctataaaagaatccattgtgcgaccacctgcttaacttttgagagccgattctggaggtacagccaagtcttagtgcttgcttagttgtctgtgtaattaataatcgtaaagtattcgagtgcagagtgtgtcttaatggacttgagtagtgacctcgataagagcgggtttaaccacctctgaaattgccacaaaaagtatatctttgccttttatgattttccacgagtgacaaagtaacgatatactctttttgtatgcccatctgaattgcgctttaactttggaatgccggaaattcgtaaggaaccttgtgggcttttagccgctttgtgtgtgcaattaagcgcgaatatctttagcacgtggattcaagccgtaaataaaaacaaaatcgagggggtgtggaacctacttgataaggtgacttgcgccgcgaaactttggacaccctgtgcttgtgcgcaaaaattaaggcgtgttctacacacacacacacgcacacacacacttatgcacatggggctaagaaatcaggctggctatttataaatggttgcaaaaacaacaaaacaacacacgcaatacacaaaaacaagtgagaaacgcgtctgctttcaatctcgccccttttttgccagtgcattctgagcgctatctgttttttcgccaaaaattaccttgcactcgactgtagcagtccttgaccgcgtgtgaggaagtggtggactccagggtaccataggggaactcctcgtagtcgcggtagtagccgctgcgcatggacccgccatatgccattgtggtgtcgctgacgcagaatccccaaacatccatgtctgtgctgtgcggtgtttcgttactatttttgcgaactgcagtgccaatcaacgggatgtgaattgtgtttgtaatgtgggtgtgtgtttttctttctttctctctttttgcgcgcgttgtgcgaggtcgtttcactttgtctctcgattggctcgggcgtccaatgaacctggcttttaaaatcactttgttttgtttttttaacaacgctttttggtgcacttttgcgtggaggtgactcgcagaggttttccttctttcttcttcttgagctgcaaatctctcgccgaaattcgatgtattctgttggaggtctctcgtgaaactgaaagccgaacactagaattactgcatttttgtagctctcgtgcgctggcgatacttcggctcttgttttgctgcccacttcgggtctcccctatatttacttctcatgtgcctacgtgtgaatgtgtgtggacagtcgcgggaaaacgtttagggcacgtgtatatgaatgaatggactttaatttgttttaaatattctttaatgtctgtagtacttggaataggtgtatatactatgctgcccgcacttgtactaaaatatttgtgtgcctggttgtaaacacgtatgtgtggcattgtgttttgttgtgttttcgcgtctcgtgcttttgtcagagtttcaccttccacccgacccctcccctttcgagtgccacacacctctcgcttggggcacattggttcgctactctcgaaatcacctctgccgtggaagcaagcattttccaagtgattcaccctgtgttagtttgaaaatttttaataaatattaattagccggggcatgaggaatactcttggaagtttttcttattagcggcgaatcgctaatgccgcggagatgacgaaaaagtaatcatgagagtgatcggacggatgttcgacggctgatcatctggaggatgggatggacatttgtgtttttataagctgcgctaatcacggtctagactgcaggccgaccatgccgtgatttagccttatttctgaaaccaaatttggttgccaagcggattgaacacttttgagagcccaaattggagtgttctttttttttataaactttccatggtcaaaatggactgtatttccagcgtgtggcattctaggcgtgtaaaccaccagctgcactttttcactactttgcctagaggtttttgaacatttgaaaaatttgtttaaatctagtgttaattggcagtctacgtcattttagccggttccgatcaaggttttgctgttttggctcaaaaagcataccgcctatattagcgccttcctgcggtttatgttttggtgcacgctcatttcagttacttttgaggagatcgtgactgatttctaaaggtgggaggacgtagagggctatatttaggaaaaaagattttttttaatgtggtacgctttggtacgtgaatgactaacagagagtgtcgccattaattgtattaatttgcggttaacggaccacggacccagattctgaccagacgacactgacgggcccctaaggtcacctatggtagctgtttttcaaggcatatttctgcacttgcgaccactgtgcacgcctacgccgctgctgctgcgcagtttgtgtaatcaaccatcctcttttcggtgcccgctcttgtttggcccacggtgctgacctgcttaatcaaacaagtgtcacttacgcacactgccaagaatgtgtgctaactagctaatacgaagctttatttgaatacatacat

SEQ ID NO: 42908 - DNA, 1306 bp, DROSOPHILA
ggtgaatcacttggaaaatgcttgcttccacggcagaggtgatttcgagagtagcgaaccaatgtgccccaagcgagaggtgtgtggcactcgaaaggggaggggtcggtttcacgagagacctccaacagaatacatcgaatttcggcgagagatttgcagctcaagaagaagaaagaaggaaaacctctgcgagtcacctccacgcaaaagtgcaccaaaaagcgttgttaaaaaaacaaaacaaagtgattttaaaagccaggttcattggacgcccgagccaatcgagagacaaagtgaaacgacctcgcacaacgcgcgcaaaaagagagaaagaaagaaaaacacacacccacattacaaacacaattcacatcccgttgattggcactgcagttcgcaaaaatagtaacgaaacaccgcacagcacagacatggatgtttggggattctgcgtcagcgacaccacaatggcatatggcgggtccatgcgcagcggctactaccgcgactacgaggagttcccctatggtaccctggagtccaccacttcctcacacgcggtcaaggactgctacagtcgagtgcaagaaaagtgcaagcagataaagtccgagaagcagatgcgcaaggactgcccattctgcaaggagcacaagaagcggccgctcatcaactacatgcgcaagcgggagcaaaggaagcaccatgacagcatctgcgaggacgaggaggacatgcacgagcacgagcatgagctggagcacacccacaatcacagccagtcgaccgtccttgccgccccgcaaagctgcaaggtgtgagtgggagcgagacgaatctactgcggacggtgcccgcagcattcgcgaaatgccatatatgtatacagatgtgtaacctaacccagaagaaaggaaacctgaaagagtaagaacaaaaacaaaaacaaagaaaacccgaggagaaaagagaaaaagctgtcgaagacgaagattgcgcgagagagcgagacagcagcctgcagctacaataatctaaggcaactgtacccctattttttttaaaatggttgcccagcatttccgcgttgcgaatacactaccatttacaaaagccagaaccacttgataccaatttacaactacctttttcattatctagcccttcgtttttacaccaacttcgcagttatgtacaactacaaacggcactttgtttaccgacaaacaatagcgcacgacgaaaaaatcaagtaacgaaaacctgccccgcttgaccaacgcattttttgaccttaggc

SEQ ID NO: 42909 - protein, 269 aa, DROSOPHILA
MLASTAEVISRVANQCAPSERCVALERGGVGFTRDLQQNTSNFGERFAAQEEERRKTSASHLHAKVHQKALLKKQNKVILKARFIGRPSQSRDKVKRPRTTRAKREKERKTHTHITNTIHIPLIGTAVRKNSNETPHSTDMDVWGFCVSDTTMAYGGSMRSGYYRDYEEFPYGTLESTTSSHAVKDCYSRVQEKCKQIKSEKQMRKDCPFCKEHKKRPLINYMRKREQRKHHDSICEDEEDMHEHEHELEHTHNHSQSTVLAAPQSCKV

SEQ ID NO: 42910 - DNA, 3990 bp, DROSOPHILA
tcatacgttgttcccatttgtatacatattatatcattgtttggcctcgattgccgaagccgtgttgcgtccttttaaaatgttcttaggatacatacaaagtaaccacttagtcagtatttaaggcccgctccattcccgatccagggttcttttgtatatgtattattgatcgagatttataaccttttcgataataaactttgataattgtgcaaccgaaggataacacagttttatggtcaacaatatctacatttattttcgcattaattagtagcataaatagttatcatagttttttttttttttctataagagtttacgttcgtttaacaattcacctgcagcaaagccgtgagtggtgcactcggcgtgattggatggatgagttggcctgtggcaagcaagcgcgtctgctgtagatttgtatgagatcatacggcggcttgctgcccctgttgctgctcatcggtacaatttacgtataaaaactggactcaggttcaaaaatatcctcatggtgatcatctatcgcttaaacataatcagctcttttaagtgaagcaacccttgttgccaaatcgttttcgctctgttaacttccgaattctatgcaggcacattttctcaatattaattctcttactagcctataatctacgctgtgtggtgtgtgtgtgtgtgtgtgtgtgttatgatgtgtggggatgagtgggtgttgagtggttgacacgtgagatttgcatatgtttagatagtacggttgtgcttctacgaaatactagcaaagattcgtcgccagctcctcctattcacattcacattacacatcaaattcactttcacatttactttgaattcagtaaaatcaagtctgtcgctgtccgttgatgagtcgggatcggaactcttctctatcctccgcctgttgtcacttaaatttggttaatttgcgtagctgcttcgaaacggtcgccttgtagaggcgctgtgttcatcattccgacgtcgttgtggttgtctccgactgaacggcggactgtgtcgcctccgcggcggtggcttccgaagcagctgcgccctcgacggcagcagcatttggtggtgctggtagagggatgggttcctgcatctttgtagcatcctgtggctgtggagtcactggctccgcattttgtccggccgcttccgaggcagcaactgcacctgtgtcaaccgctggagctgttgcgctaggtgcaggtgctgctcctgatgccgctctggcattctcctcggccttggcctccagcacatttatcgaagcctgaatgcatctgcaaggaacaatcattgaattaattaaattcgataatgagctctggtgactctggtcacttacttgatagcctcctttcgggccagacgaatgctgtccttgccgtttgtgtcgatggtgtctagcttaagcaggttgcgggtcagcatctcgtccaggtaggcgtactccttctcctcgcgcgttcccttgaactgctccaccttgcccatgagctccagtacgtcgcgctgaatgtcctggattttgttaatagagttgagggtatgtggtgtctgtggcggcaatccagcggctccctcaactggcacctgctgctcaggttgcgcctgggtgtttagtggcgtcggtctgttgtgctgctgtggagcagcgtgtgcctgtggctgcgcctgcgcatatgcctgtgcctgagcttgggcctgagcactgggcggagcgttctggttcggtatctccttgtgggcattgatgatgggctcggagcgaccctcaacaaagatgggaatggtgcgcacataggtgccacccggggtctgtggagctggcggcggggtctgctgcttttgctggggatgcgtctgctggtgcggcgcatagtaggtcttgaactgctgaccctgaacgggcggacttgtctgggtgccaaacggttggctatgtactcccggttgctgatgctgttgctgctgctggtgatactgcagattctgctgctgctgctctggcggaggggcggagtgggatcgcagtccctgatcctgctcggcgacactcttcacgcccatgtcgacagtgtttcgcagtccgtgctggttcaagttagtcggcggggcacaatcaacctccgagcgaccggcaggatcctccgtctggatggcagcatcgcaaaggcgctttgaaggcgtctgcggcacctgctgctgggttggtccggcatagactggctgttgctggggcggcacaccgaactggaagtgcgtctggggttgctgttgggtgtactgcggctgtggctgcggctgttgctgctgtggaacttgtccgggtgcaggagcagctccggtaccacgtctgcctccgaaaccatctgggatatactggcggaactccgagggcagccgattaaagaagtcatcatcgtggtccatgtgagtgttggccccaccggccattcgacctcggcggcccatcgttgagaagcgggggaaaccaaagtctggatcgtcgaaataggatggaaagtcatcatcagcatggacttgaccactgggaccgtgcaaactgctccgcttacgtgagtcgccgaagccggcgaagggatcgtgcatcctgcccaggtgcgagcgcgggaacatgttgtccatgtccatgttcggttcgaatccaaaggtcggctgctatcaacagagagtaattataaataattaaattataatgaattcggaatgattctagctaagaagctctaatatgcaggtattcttttggtagcaaccacattctaatagttattacttttataatttaaatcatgtttattaagttgcaaatattggtttgaaagtaaaagtgcttttatccggttaaaaatcgtattttaaataaaataatcgctgtttcacatcaactatgtatttgttctgtgtagcaatagaggagtgcaaattgttcgactcggtgggcgaattgtttataaataacagggtgagtcagaaccatatagattgggtacgagtgtgggcaaacaagtgatgtcaattggcactgaatgaacagctgttggggagcggatggatctcgatgtcgatgtcgatgtcggaaccttaccttttgcctgctcaatttgttaactttatcaatgagctgtgctcactgctcgtcaattatttcgctacaagtgtatttacgagtatttagctatagcctgaatgtctttttagcttttgaatgcttttccgcttggtgacgtgatgcactgcgtccgattgtttacgtgcgaatgaggcgactcgtcggccgagaaggccttttaaagcgaatggcgcccactctcgaatccgctggctgattctggccacttctcgtagtttctgagacagtcgagtgttctcggttcggctcgacgaccgattttgagtctctcctaaaaggacgctctctctgctgttcaactcaattacccgaagtgacttgtggaagtacagtgaaataaaagattcggctttactgtatcacattttctgaattgaacggtagggacaagataagtgtgtttacttcaacaattagtattgttttacaatacccttcaattattaatgataatttactggctttcttacataagcgcacttgaagaaattgtcgtatatacgagtatgtatacaaatttgtatttttttaaggttttataaggctttttttaaatgggaaaccttttgtaaaacagatatatgtttaaaaacgcctttctgcggttacaagaagttcttaaacttctcgctatcatggcacctttatctgtttaaagtccaaagttcaccttagcacgtacccactgtacgttaagttggtgatgacgtttttatatagtcaacgtcaccaacgcattgccgaggcccccgcgttggccaagttgatgttgagcaaccaaaatccacccacgc

SEQ ID NO: 42911 - DNA, 1729 bp, DROSOPHILA
atttgcactcctctattgctacacagaacaaatacatagttgatgtgaaacagcgattattttatttaaaatacgatttttaaccggataaaagcacttttactttcaaaccaatatttgcaacttaataaacatgatttaaattataaaacagccgacctttggattcgaaccgaacatggacatggacaacatgttcccgcgctcgcacctgggcaggatgcacgatcccttcgccggcttcggcgactcacactttggtttcccccgcttctcaacgatgggccgccgaggtcgaatggccggtggggccaacactcacatggaccacgatgatgacttctttaatcggctgccctcggagttccgccagtatatcccagatggtttcggaggcagacgtggtaccggagctgctcctgcacccggacaagttccacagcagcaacagccgcagccacagccgcagtacacccaacagcaaccccagacgcacttccagttcggtgtgccgccccagcaacagccagtctatgccggaccaacccagcagcaggtgccgcagacgccttcaaagcgcctttgcgatgctgccatccagacggaggatcctgccggtcgctcggaggttgattgtgccccgccgactaacttgaaccagcacggactgcgaaacactgtcgacatgggcgtgaagagtgtcgccgagcaggatcagggactgcgatcccactccgcccctccgccagagcagcagcagcagaatctgcagtatcaccagcagcagcaacagcatcagcaaccgggagtacatagccaaccgtttggcacccagacaagtccgcccgttcagggtcagcagttcaagacctactatgcgccgcaccagcagacgcatccccagcaaaagcagcagaccccgccgccagctccacagaccccgggtggcacctatgtgcgcaccattcccatctttgttgagggtcgctccgagcccatcatcaatgcccacaaggagataccgaaccagaacgctccgcccagtgctcaggcccaagctcaggcacaggcatatgcgcaggcgcagccacaggcacacgctgctccacagcagcacaacagaccgacgccactaaacacccaggcgcaacctgagcagcaggtgccagttgagggagccgctggattgccgccacagacaccacataccctcaactctattaacaaaatccaggacattcagcgcgacgtactggagctcatgggcaaggtggagcagttcaagggaacgcgcgaggagaaggagtacgcctacctggacgagatgctgacccgcaacctgcttaagctagacaccatcgacacaaacggcaaggacagcattcgtctggcccgaaaggaggctatcaaatgcattcaggcttcgataaatgtgctggaggccaaggccgaggagaatgccagagcggcatcaggagcagcacctgcacctagcgcaacagctccagcggttgacacaggtgcagttgctgcctcggaagcggccggacaaaatgcggagccagtgactccacagccacaggatgctacaaagatgcaggaacccatccctctaccagcaccaccaaatgctgctgccgtcgagggcgcagctgcttcggaagccaccgccgcggaggcgacacagtccgccgttcagtcggagacaaccacaacgacgtcggaatga

SEQ ID NO: 42912 - protein, 516 aa, DROSOPHILA; identical to SEQ ID NO: 26001

SEQ ID NO: 42913 - DNA, 2897 bp, DROSOPHILA
cgctacaaccattttccagagtgttgaggtggattgggagccactggacgcggatctcaatgagacactgagtgacacacacaactccagtcgcattgcccttaatctgagtgccatgaaggatgttctgttgaataaaccgctgaaacgcctgctcaacgcatccagcagcaagagcaatacaccgcgacagacatccactccctcacctggaagccagctggtgcacttcaccaaacgcctgctgacctacgatccggaggagatacctgaaagccagagtagtttcacaacgctcgtccagcaggagctgcaaatcatgcagcgatccgcccagcgtttacggcgacactgcgaggctgccctactcgagcgtgaaaaccatcaggacaacggcgtcctggccgtcagcctgcaggaggctctggcacgaatggacaccgtgctgaacgggatgcacacttcgttggcgagagcggaggccactgcatgtgtcacctcgccgacgaaaacacagaaggctgtgcgctttcttatcgattgacggagattagttcgcaccttggactagattttaatgctgcaatgtgctttgtgttgtttttatgtttttaaatatatattttttgtatattgatttttaacaataaaatgtattgatagcaccttcaagtgaaactggcttttgggaaatattttaaagtggcggtacaaaaaaagacttttcaattagtttatcaaataaatcactagctttagtttgtttttgtaatgattttctggtcttacataacttaatatccaaatcatgcttgtacgtaagtgacataatagtttgctctggcattaaaataattatttacttcattatcacctcttcgaaagtttatcacggttttcgaacaactttgtgtcaacatccaaatattggtttataaaaatattaaaagtaccgcaggctaataaccatgtgttccctctgcctttcttgtggaaatcttcaaccttgggcctcctcctcttccacgccttcagtggactccagctccttatcgccagccaattgctcaagtagttttgtgttcagatcaactacccaatcgcagaactgtccgccctttaggcttacgaagtcggccaggaacacgtttacccttggctcgtcctttggctcgaagggacctggaatctgttcctgaatccaaggctgcagcttcttgtccacccgtttggctgtgctcttcagggtgaagaagagccggaaggcgatatagcgaccagtgggcgtgataaggcactgggagacataaccctgttggggctgtcgcgagagtagggaatcctccagaaaggactgcagcttcttgacactcgctttattgggccacggtgtgggccacgcataactgggccagaatctcagcggcagtggaatgggacatcgcctgtagatgatcaccacgctgcgctgcatttccaagcatctattcagagtacaatccttgagtgaaccatccactgtggagtacagacgatgggcgaagaactggatcagatccttgtgcagcttctggtgatgagccactgtcatggcgtaaaagtgctgcagatccaggattaccacctcctctggatgggtgtccacgaactggcgaatctccagaagtggctcaaaaatctccatggcaaaaaggccatgacagtagtagaacttatcatccttctgggctatccttaggtcaaagtaccgcactcccagctccagttgatccagtgttccagaagattgcgtcttgctccaacggcgcacgaagcagggaaagaagcgatgccaccgcctaatcgaaatttccgcatctggcgatagttcggacttgctatttatgccataagtcatcgaattgtgggaacctatactagattgcagactcctcaattaattcagcaagtacgatgatctcatccgtacctggaatagccagattgattatcgacaggtcacgcaactcgcttggcagatccctcatccagtgatccttggacatggtgcctccttgtcctatctaatcctttctatgaagacatacaccaatgttgatgttgttgatgttggggataatccataaataatccatgggcttcacaagggggttcgtttaactgttgcgtagtatatttagtgaggctgcattgtattgcggcatttattaaataccaaacagaagcagctgattggagtccgccaaacatttacagttttaaatgaacacaaagtacagtggatactccatgactgcagtaaattagctgaaacggcattgctagaatatctttatagctgcagttaaccagttaaaactgtcccgaactgtcacataaaatttgaaaatatctaaaagtatattttggcagtaacatcttacaaaaaaattgtatatacaatgtaaactacccaaagtacctaaagttcaagcttagtatgtatttgttaaatttattatatattttgatgccacttgtttaatggatgtgatttaaactgaggtttcactgtgttgctttggaatcagctgttcagtttttcactttcccatttcgttgtttactgatatttcgtccaaagacactagtgtctttgtttcattacagctattccccctgaggatgtcgcggaagtgcgagttcctggtggtcggtggaggtattgctggcgtcagctgcgccgagtccctggccatctaccgacccaatgcctccattctactgctcacggagtccagcatcgtgaagagtgtgaccaatttggtgccggtggctcgctatctgcataagttcgacgttcgggaacaggatgtctccgaaatgggagctagttttcagacactagtggatcgcct

SEQ ID NO: 42914 - DNA, 897 bp, DROSOPHILA
atgacttatggcataaatagcaagtccgaactatcgccagatgcggaaatttcgattaggcggtggcatcgcttctttccctgcttcgtgcgccgttggagcaagacgcaatcttctggaacactggatcaactggagctgggagtgcggtactttgacctaaggatagcccagaaggatgataagttctactactgtcatggcctttttgccatggagatttttgagccacttctggagattcgccagttcgtggacacccatccagaggaggtggtaatcctggatctgcagcacttttacgccatgacagtggctcatcaccagaagctgcacaaggatctgatccagttcttcgcccatcgtctgtactccacagtggatggttcactcaaggattgtactctgaatagatgcttggaaatgcagcgcagcgtggtgatcatctacaggcgatgtcccattccactgccgctgagattctggcccagttatgcgtggcccacaccgtggcccaataaagcgagtgtcaagaagctgcagtcctttctggaggattccctactctcgcgacagccccaacagggttatgtctcccagtgccttatcacgcccactggtcgctatatcgccttccggctcttcttcaccctgaagagcacagccaaacgggtggacaagaagctgcagccttggattcaggaacagattccaggtcccttcgagccaaaggacgagccaagggtaaacgtgttcctggccgacttcgtaagcctaaagggcggacagttctgcgattgggtagttgatctgaacacaaaactacttgagcaattggctggcgataaggagctggagtccactgaaggcgtggaagaggaggaggcccaaggttga

SEQ ID NO: 42915 - protein, 298 aa, DROSOPHILA
MTYGINSKSELSPDAEISIRRWHRFFPCFVRRWSKTQSSGTLDQLELGVRYFDLRIAQKDDKFYYCHGLFAMEIFEPLLEIRQFVDTHPEEVVILDLQHFYAMTVAHHQKLHKDLIQFFAHRLYSTVDGSLKDCTLNRCLEMQRSVVIIYRRCPIPLPLRFWPSYAWPTPWPNKASVKKLQSFLEDSLLSRQPQQGYVSQCLITPTGRYIAFRLFFTLKSTAKRVDKKLQPWIQEQIPGPFEPKDEPRVNVFLADFVSLKGGQFCDWVVDLNTKLLEQLAGDKELESTEGVEEEEAQG

SEQ ID NO: 42916 - DNA, 3050 bp, DROSOPHILA
ataccctttatcaacgagcttacaaactgagtggctgcaaaggccatcgatagggtggccgagcccaggccatccttggcattaaccacttctgtgcccgcattttggatgcgttggatcaacgcttcgcgctccttatcggtacccttaaaggggggatcacactgcgacagtatgggcaggatggtccgacctgtatggccaccgattacgggtatattcactttctggggatcaacgttgagaatgtccgctacaaaggtctgggctcgtaccacatccagagtggtgacaccaaatagtcgattcggatcgtatgtaccctttgctttaaggatcgtggccacgatgggtactatcacgttgatggggttcgtgatgaaggcaagcatggcaccgggacaaacttcgctagccgcaaaagccacttcgcaggcaacgctggcattcacgtccaccaaatcttcgcgcttcattccgggcttacgtggcaaacccgccggtatcaccactatatcagccttatccatagctttttttaaaccattcttaccctcgaatgggcacactgaagcacgggtgttgatatgagataagtctactcctacaccggttgtattcttaatgtcgtacagagacagggtcgagatttgcggattatgcttgagaagaagggacagcggctgaccgattccacccaccgatcccacaacggcgaccttgagacctcggttgatatatccaagctgctggaccttgggaggcaagttgccaacatggcttaacaatctagaggccaaaaacattttataattttttttttaaaatgttaaaatttcaagtgggtttcaatacgagaagaagtgtaatcaaaaggtatgtcgtaagcttactaaaatttagtatacctttcgtttattttatctgattagtaggcttttgcttttaactgtcaacagttggaatcggcaacaatattattcattatattctgagcaaaatgttgttactgacaagtcttaaaagcctggcaaaaccagctacatggggagttgtggtccgcactttaaaggtcgccgttgtcggtgccggaggaggaattggacaaccgctatcgcttctgctccgtcgctgtcctggaatcgatgagctggctctacatgatctcagcgaaatgaagggaattgctacggatctatcccatataagccaaacgggaaaggtgataggttttaccggtgaaaaggaactggagtcggcggtgagtggagctgatgtggtggttgtggcggcagggatgccacgtctgccaggaatgcaaagggatcacctgatggccgccaatggaaatgttgcagtgaaagttgccactgccattagcaatgcctctccacgagctcatcttgcctttattaccaatccggtcaatatgattgtgcccgccgcagctgaggttcttatggcccatggaacttttgattctcgtcggctcttcggtattacgactttggatgtggtgcgatcgaaaaagttcattggtgattctatgaacatatcaccggatgacgtaaacattccagttattggtggccatgcggggattacaattctaccgctcatttcgcagtgtcagccgatatatagatgtgatctccaggagatccagaatctaactcatcgcattcaggaggcgggcacagaggtggtgaatgccaaagctggaaaaggatctgccaccctatcgatggcttatgctggcgcaactttcgtgaactccctgctgcgtggaattgctggacaggatggtctaatcgagtgcgcttttgtcgcctccaaactaaccgacgccccattctttgctagtccattggaattgggaaaggatggtatcaagcgctatataccacttccccagatgagtgactacgaaaaggaggctttggaaaagctactacctattctacgacagaatgctgatgagggtgtcaattttgcaaaaatgattttgagtggacaatcacattctcccattccagcggccttgccgtaaaaaaataaaatatgtgttactgtattatcttataactaataaaagaaaagatatctatagattttattaaaagcatggaatgtttcatattttgccttaacgaaaatctttggcggaaatatctggtaggagtatagattttatttggcattttatctggattacatccttcaggcagttttgtctttgtagccgtctagacaaagcacaaaaaccattctatggcaaccgaatgtttgaatggttacatttagttaaatattttcaaggtaattgggtaaggattggatagcaggatctttaaattcatttgcttttatttctgtttaaatggccgcaaataaattgcggccaaaatatttctgtgggccagcgtatatcgtctggcagtaaattacatttgcactgagaccatctctgctcgacctgctaacaaattgcttggccatctttgccccccccccccccagaaaactcgaacatccttcccatgtgtggcccccaaaagtaggcagcaattttcttcactttatttcacactcggcccgtaaaacgaaaaacacattgggtgtgtccattttatcttgttgtcccccccattgccaaaaaggaaagtgggtggtggcccgacaactttcttgcgacccagtttcactttcgccaggagttcacctggccacgtttcagattgagcgtgtgtgtgtatgagtaattccactattgcggctgcatttgttgctgccacccggtctgacaacatataaattaagcccaggcatttcgggcaacatgttggccagaaaatgtatttccaaataacaaaacatggcccccaaaaaggtgtctcagttaagtggctttccaagtcattacgtgggttgataatatggcatttcaggatttgagaacgatcataaacggaagacatgaaatattaattttcttttttttttttagcatgcaaatctatagaatatattatttccttttccacacgaat

SEQ ID NO: 42917 - DNA, 1050 bp, DROSOPHILA
atgttgttactgacaagtcttaaaagcctggcaaaaccagctacatggggagttgtggtccgcactttaaaggtcgccgttgtcggtgccggaggaggaattggacaaccgctatcgcttctgctccgtcgctgtcctggaatcgatgagctggctctacatgatctcagcgaaatgaagggaattgctacggatctatcccatataagccaaacgggaaaggtgataggttttaccggtgaaaaggaactggagtcggcggtgagtggagctgatgtggtggttgtggcggcagggatgccacgtctgccaggaatgcaaagggatcacctgatggccgccaatggaaatgttgcagtgaaagttgccactgccattagcaatgcctctccacgagctcatcttgcctttattaccaatccggtcaatatgattgtgcccgccgcagctgaggttcttatggcccatggaacttttgattctcgtcggctcttcggtattacgactttggatgtggtgcgatcgaaaaagttcattggtgattctatgaacatatcaccggatgacgtaaacattccagttattggtggccatgcggggattacaattctaccgctcatttcgcagtgtcagccgatatatagatgtgatctccaggagatccagaatctaactcatcgcattcaggaggcgggcacagaggtggtgaatgccaaagctggaaaaggatctgccaccctatcgatggcttatgctggcgcaactttcgtgaactccctgctgcgtggaattgctggacaggatggtctaatcgagtgcgcttttgtcgcctccaaactaaccgacgccccattctttgctagtccattggaattgggaaaggatggtatcaagcgctatataccacttccccagatgagtgactacgaaaaggaggctttggaaaagctactacctattctacgacagaatgctgatgagggtgtcaattttgcaaaaatgattttgagtggacaatcacattctcccattccagcggccttgccgtaa

SEQ ID NO: 42918 - protein, 349 aa, DROSOPHILA
MLLLTSLKSLAKPATWGVVVRTLKVAVVGAGGGIGQPLSLLLRRCPGIDELALHDLSEMKGIATDLSHISQTGKVIGFTGEKELESAVSGADVVVVAAGMPRLPGMQRDHLMAANGNVAVKVATAISNASPRAHLAFITNPVNMIVPAAAEVLMAHGTFDSRRLFGITTLDVVRSKKFIGDSMNISPDDVNIPVIGGHAGITILPLISQCQPIYRCDLQEIQNLTHRIQEAGTEVVNAKAGKGSATLSMAYAGATFVNSLLRGIAGQDGLIECAFVASKLTDAPFFASPLELGKDGIKRYIPLPQMSDYEKEALEKLLPILRQNADEGVNFAKMILSGQSHSPIPAALP

SEQ ID NO: 42919 - DNA, 3143 bp, DROSOPHILA
aagcacttgtattcaattcagaggtaaagccaatgatttaggcacaggtatttatattattttatcctttacagaattgtatttaaattattcataagcctttcagataaattaataaaaaagtaatcttgaatatttaatatctatgtatacattaaatgatgatggtaatgtgtaccgcactttgtttaattaaatccaaaatctagatttccaaaacggtgacctttgtgacggtagtgtcaaaataataacattggtcgcgccataacaaaggcgacgacaaatctaattacattataagccttttaggggcttacaagccaaaaagcgtaaagttttcatgccgacagcaataaaactgtcgtctcagacacttttctgcaagaagtcttcggcgaaactcaacctctgcccaaaaaccaaaacccaaaagatgtcgagacccgaattcaattaatgtaattcagttgaacagggaaactaatttggccacctgcggctgactgaaaaataaaattgcgactaattaagtaatgagtgatacggagtaccgaaaaacttcttcaaagtttgcttgccaaactacttaggttcaacaaggaaactaaatcgtgtgcatcatctcaaatatattgtatatatatacatacgcttgagtcaagcagcccaaatgtacaaatctcgagacataaatcacaatttctttgccattaagacgagaccgcaaagatttgcggctccgctgagttcgctgatggcatgggaatccgaaactgtttggtgccgagttccagctgtgtcagtggctttcgcgcctggatccccgacatcaagcaaagaaagaggaaaaaagatacaaactcagggtttccttaacttaccagcattacggccataaaacttgtggtctaacaatggaacagtctcataatttaaatccattttccggactttttaagactgcaataaacatttcctatcatcagatatctattttaacaaaataacctaataatttattaagaaaaccaaaatcggaataatatgtttatgtaaattgtatctccattgttatgcacaactgcatatcataccctcgcccaatttgatgccctttgcgatactctccttcaaaatgggtagcataccatttagagccttcctttcctcatcgtccaaatcgggcaatcctgtgttttccttgacaccctggggtcccagtatcagtggggtggcgaagaactgggcctccgtgacatcagactccacataggcacattccacaatgcactcgtcctttgaacccttgataccctttatcaacgagcttacaaactgagtggctgcaaaggccatcgatagggtggccgagcccaggccatccttggcattaaccacttctgtgcccgcattttggatgcgttggatcaacgcttcgcgctccttatcggtacccttaaaggggggatcacactgcgacagtatgggcaggatggtccgacctgtatggccaccgattacgggtatattcactttctggggatcaacgttgagaatgtccgctacaaaggtctgggctcgtaccacatccagagtggtgacaccaaatagtcgattcggatcgtatgtaccctttgctttaaggatcgtggccacgatgggtactatcacgttgatggggttcgtgatgaaggcaagcatggcaccgggacaaacttcgctagccgcaaaagccacttcgcaggcaacgctggcattcacgtccaccaaatcttcgcgcttcattccgggcttacgtggcaaacccgccggtatcaccactatatcagccttatccatagctttttttaaaccattcttaccctcgaatgggcacactgaagcacgggtgttgatatgagataagtctactcctacaccggttgtattcttaatgtcgtacagagacagggtcgagatttgcggattatgcttgagaagaagggacagcggctgaccgattccacccaccgatcccacaacggcgaccttgagacctcggttgatatatccaagctgctggaccttgggaggcaagttgccaacatggcttaacaatctagaggccaaaaacattttataattttttttttaaaatgttaaaatttcaagtgggtttcaatacgagaagaagtgtaatcaaaaggtatgtcgtaagcttactaaaatttagtatacctttcgtttattttatctgattagtaggcttttgcttttaactgtcaacagttggaatcggcaacaatattattcattatattctgagcaaaatgttgttactgacaagtcttaaaagcctggcaaaaccagctacatggggagttgtggtccgcactttaaaggtcgccgttgtcggtgccggaggaggaattggacaaccgctatcgcttctgctccgtcgctgtcctggaatcgatgagctggctctacatgatctcagcgaaatgaagggaattgctacggatctatcccatataagccaaacgggaaaggtgataggttttaccggtgaaaaggaactggagtcggcggtgagtggagctgatgtggtggttgtggcggcagggatgccacgtctgccaggaatgcaaagggatcacctgatggccgccaatggaaatgttgcagtgaaagttgccactgccattagcaatgcctctccacgagctcatcttgcctttattaccaatccggtcaatatgattgtgcccgccgcagctgaggttcttatggcccatggaacttttgattctcgtcggctcttcggtattacgactttggatgtggtgcgatcgaaaaagttcattggtgattctatgaacatatcaccggatgacgtaaacattccagttattggtggccatgcggggattacaattctaccgctcatttcgcagtgtcagccgatatatagatgtgatctccaggagatccagaatctaactcatcgcattcaggaggcgggcacagaggtggtgaatgccaaagctggaaaaggatctgccaccctatcgatggcttatgctggcgcaactttcgtgaactccctgctgcgtggaattgctggacaggatggtctaatcgagtgcgcttttgtcgcc

SEQ ID NO: 42920 - DNA, 1143 bp, DROSOPHILA
aacattttaaaaaaaaaattataaaatgtttttggcctctagattgttaagccatgttggcaacttgcctcccaaggtccagcagcttggatatatcaaccgaggtctcaaggtcgccgttgtgggatcggtgggtggaatcggtcagccgctgtcccttcttctcaagcataatccgcaaatctcgaccctgtctctgtacgacattaagaatacaaccggtgtaggagtagacttatctcatatcaacacccgtgcttcagtgtgcccattcgagggtaagaatggtttaaaaaaagctatggataaggctgatatagtggtgataccggcgggtttgccacgtaagcccggaatgaagcgcgaagatttggtggacgtgaatgccagcgttgcctgcgaagtggcttttgcggctagcgaagtttgtcccggtgccatgcttgccttcatcacgaaccccatcaacgtgatagtacccatcgtggccacgatccttaaagcaaagggtacatacgatccgaatcgactatttggtgtcaccactctggatgtggtacgagcccagacctttgtagcggacattctcaacgttgatccccagaaagtgaatatacccgtaatcggtggccatacaggtcggaccatcctgcccatactgtcgcagtgtgatcccccctttaagggtaccgataaggagcgcgaagcgttgatccaacgcatccaaaatgcgggcacagaagtggttaatgccaaggatggcctgggctcggccaccctatcgatggcctttgcagccactcagtttgtaagctcgttgataaagggtatcaagggttcaaaggacgagtgcattgtggaatgtgcctatgtggagtctgatgtcacggaggcccagttcttcgccaccccactgatactgggaccccagggtgtcaaggaaaacacaggattgcccgatttggacgatgaggaaaggaaggctctaaatggtatgctacccattttgaaggagagtatcgcaaagggcatcaaattgggcgagggtatgatatgcagttgtgcataacaatggagatacaatttacataaacatattattccgattttggttttcttaataaattattaggttattttgtt

SEQ ID NO: 42921 - protein, 347 aa, DROSOPHILA
MFLASRLLSHVGNLPPKVQQLGYINRGLKVAVVGSVGGIGQPLSLLLKHNPQISTLSLYDIKNTTGVGVDLSHINTRASVCPFEGKNGLKKAMDKADIVVIPAGLPRKPGMKREDLVDVNASVACEVAFAASEVCPGAMLAFITNPINVIVPIVATILKAKGTYDPNRLFGVTTLDVVRAQTFVADILNVDPQKVNIPVIGGHTGRTILPILSQCDPPFKGTDKEREALIQRIQNAGTEVVNAKDGLGSATLSMAFAATQFVSSLIKGIKGSKDECIVECAYVESDVTEAQFFATPLILGPQGVKENTGLPDLDDEERKALNGMLPILKESIAKGIKLGEGMICSCA

SEQ ID NO: 42922 - DNA, 3234 bp, DROSOPHILA
cggagttcagcttggtctgccgcttggcactggtcagcatctcctcctgcagcttgagcatggcttcgtgctcgcggagattgttcacatatatcagttcgatggagtcgccggcagagtccgagttcggtggaattctacaggaagttacgaataggtcaaataattgataccagatagagacatccttgcaacagtaaattacgaagctgtaaaatttctcaaaaatctcaaactgcactaccaggatcattttaggattgggtacttctctttcagccttttttcagtgtgggattcactacttacacgaagaatttgttctgctgcttagagctgatatagtcccccacggcatcctccggccgcaggtccagatttcccagaacatcgagcttcttggtgggcttcacgcggggcatcttggatctctttgccgaaagtaaaagctcaagtgtacgtttttgttagttttttatatttttttttgctttggttaccgcgatacagcgcggattgtgcgttttgtagtagtagttgtgtgtgctgtgtgcttacttttcaaagtgtgttattgttttgtaataaaaattaacaagacctacttggaacatgttttttatttgggtgacacataaaaacaattggttgccaggaggttcttttattaccgtggcaatggttgagaaggtgtaaccagttttgtgtcatggtaactgcacaatttggtttctttcgaaaaaacaaaataggaagcttcttcggcaagccgaacctaatatactcttgatactcgatgatgattaatttttaatcaacaactatagaattatgatatcttttcaattgtttttacttgatttaacgactggtcgtacttatgaaggaaacgtcagcaattgcataaatatctgaatgtagtaataaaaaatggtttaatccttttatccttgactgtgctgtctgcccatatacatgtagaattactcatcacacatcgttctccaatagatattcccccaatatatatcaatatatttgaaaagattatattttaataggacaagatgccgcgacgtaagcccaccattaagaccgatgtgatcggggatctggacctcagtccagaggtcgccatcgatgactatcgcgtctctcgccagcaggaccaattcttcgtgtaagctaaaagagcaactacaatatgtaagtcatactattaatgaaacttggatggtctaggaaaccgcccaattgggattcggccggggataacatcgagatgctgtacatagccaatctccgggagtacgacgccatgaagcaggttcagatccagctactcaaagatgccaagcggcaagccgcattaaatgtgcagcgcattcgcaagatgtacaagattcaggagcgcctgcgcaaacgcttcgtcgaggtgaatggattcatcaaggattgtgcggacaaaaagcgcagtgcggataagtcgattcgcgaggagaccgttctccacgcggaggtcaccaaggagatagacgagttcaagacctccattgccgaactgagcacctttcgcaatgcgctcaaggccacggtggctcagtttcagccatacgagagggtcctggaggaggtagtcgaggtgtcggacatcttcatctcaacgaaagactgcatcgatcgatgtgacgctctaagtgggttctccacacctcctgtaatttccattctaaatttgtttttgttgtgcagtgttggcccaggtggagatcaataagctggagagccagaaactcaacgagatcgaggagatgcgcctgcgaatggttcagatcaccagcgaggcggccttgaccgttttgggcctcaaaaacgatctggcccgtttggatcgttcctatgtcagctcgcgggccacttgcctcaagtgggaaaagatactaagtgcctgcaaggacaccacgtcgctctacaacctggacaaggagcgcatgtttgatggcattcaaatcctgtaccgcatgctctgcaaacgtcgaggtatgtccttgaaatcctttgactctagctgatgtaccaactccacccccgcagacattgttcccagctaccacagctatgagatcgacaaaatcatgagcttcatcatgcgcgaaataagtcttctttcatcggtcctccaggaattggagtccaataagggcgataaagtcggcgctggacgtatgtgctagtcggaaaatataatatttttcatggagcataaataaataaataaatgattttaaatcctttaattaatggaacgaagttcaaatagcttttactaatttccgtttgggttatttttactgcaaatatttaaaaaaaattcagccgaatcagagattagaagggttgtagcgaaggaataaatgtacgacttgatttatgagctccaaactgtttagggttttttgtttgaaccgagaggccttacatcctttcagatttactctcattcctaagaacttaaatgggcgctccaccttcagctttatggcacccataacatttgtctaaccccaaaaccttgccagccctcccaaaaaaaaaaaaaaaaaaaaaaaaaactagagaacccacaacattcggttgggcattgttgttccgtgcccaaaagaaaatcaaatggaatccgataaaaaggaaatgcattcgaggactgagataccagaggctgggcaactttcaagtggcacacgaacttcaaatcagggaaggacaaagcgatgggcaagaaaataaagttggcaaatcgaatctgcgacatctttccattcaattgccaattggattctatggcccggggataatctaacttaagcacagataattcttttatgcgaacattttgatttctgtcctcgcatttacaacaacgttggctcgaatggaactaccaactaatttttgtgcccgagaaccgttgccacgcccccgctccagctccacctaccgcccacacgtacgcccacccagggcattgagttgagtcgccagcggaggcgtggcacttgtctcttattcaatttgctttatttgatttgcgatttttgctgatatcagcccgaaggaaaactcccaggactaccgacaggacactcgacgatatacgtagcctaaaaatcaaatcaaacggaaagcaaactaaaatgcacagacatttatttcgagcaagaataaaaaacaaaa

SEQ ID NO: 42923 - DNA, 1063 bp, DROSOPHILA
ttctccaatagatattcccccaatatatatcaatatatttgaaaagattatattttaataggacaagatgccgcgacgtaagcccaccattaagaccgatgtgatcggggatctggacctcagtccagaggtcgccatcgatgactatcgcgtctctcgccagcaggaccaattcttcgtgaaaccgcccaattgggattcggccggggataacatcgagatgctgtacatagccaatctccgggagtacgacgccatgaagcaggttcagatccagctactcaaagatgccaagcggcaagccgcattaaatgtgcagcgcattcgcaagatgtacaagattcaggagcgcctgcgcaaacgcttcgtcgaggtgaatggattcatcaaggattgtgcggacaaaaagcgcagtgcggataagtcgattcgcgaggagaccgttctccacgcggaggtcaccaaggagatagacgagttcaagacctccattgccgaactgagcacctttcgcaatgcgctcaaggccacggtggctcagtttcagccatacgagagggtcctggaggaggtagtcgaggtgtcggacatcttcatctcaacgaaagactgcatcgatcgatgtgacgctctaatgttggcccaggtggagatcaataagctggagagccagaaactcaacgagatcgaggagatgcgcctgcgaatggttcagatcaccagcgaggcggccttgaccgttttgggcctcaaaaacgatctggcccgtttggatcgttcctatgtcagctcgcgggccacttgcctcaagtgggaaaagatactaagtgcctgcaaggacaccacgtcgctctacaacctggacaaggagcgcatgtttgatggcattcaaatcctgtaccgcatgctctgcaaacgtcgagacattgttcccagctaccacagctatgagatcgacaaaatcatgagcttcatcatgcgcgaaataagtcttctttcatcggtcctccaggaattggagtccaataagggcgataaagtcggcgctggacgtatgtgctag

SEQ ID NO: 42924 - protein, 331 aa, DROSOPHILA
MPRRKPTIKTDVIGDLDLSPEVAIDDYRVSRQQDQFFVKPPNWDSAGDNIEMLYIANLREYDAMKQVQIQLLKDAKRQAALNVQRIRKMYKIQERLRKRFVEVNGFIKDCADKKRSADKSIREETVLHAEVTKEIDEFKTSIAELSTFRNALKATVAQFQPYERVLEEVVEVSDIFISTKDCIDRCDALMLAQVEINKLESQKLNEIEEMRLRMVQITSEAALTVLGLKNDLARLDRSYVSSRATCLKWEKILSACKDTTSLYNLDKERMFDGIQILYRMLCKRRDIVPSYHSYEIDKIMSFIMREISLLSSVLQELESNKGDKVGAGRMC

SEQ ID NO: 42925 - DNA, 2706 bp, DROSOPHILA
tataaaatttgcatttgcgtggcacatgcaatgtacggataaagtttggctatttcgggctagttgtgtacgttttttcgagtcctgtcagccggaagtaaaaggttttaagcggaagtgcgcagagttgcagcgacatattgtgttttcgtatccgagtgtgtgtgtgtgtgtgtaattatatgctcgggtatgctaaatgttgcggagacatgcaaagcgggtcttaccaagctgctagtttgttttttgaacgaggttaaatgaggattgggcaaatattagaaaatgtttcgctactttcaaaatttaataagcacaattcgggccaaaaggattaccctggaaataaacgaaatacttgtatgtattcgctttttatgtaagggatttttattatcctaaaagattgattgcgattgaattgctgattaaattaagcatgcaagaatggtgatttacgttaaggtcttgttgttcgtgtgacttgcatttattactcctcatcgaatgactattaacatataaatgccacaactcagcagtcgttcgttttggtatttaattaatgccattttaatatgggaaattaatgaattttaattcaatcgagcagcgaccacacggaagcatttagtgaacgaaaataaatgcatgaacattgtcaatatgtcagctgaatgcacttgattaatttgtaagaattctttagccttacctatgagtattgatggcatgtcaatggcattattaaaatattcatataagtatttgcgaaaatgggtaaccacttaattagttcagcttaaatttgtgctgtctttgttgtaaaaatacaaatgttacactgtttataaatattaacgttaacattaagcacttaactaattttaaggagttcagaattttgatcagcaaacacttgttaaatataatcttttctccttttctaacactgtccagaatttcatctttcaattttgcacctacgattttgtatattttctagaagtaagccttacataatggatgtatcccagtcagatggcccaacagaaaatgaggctggcggaatgaagaacattacacatcagttcgagttcatgtctaataggttgaaggagcatatgaaatacaacatcctccgtaacgctgtgttttacaagaagattcccctgcagaagaaactaaaacttgcccttgaaagaaatatcggtccccatgcctatataatagttaacgatacaatctacaagtgccaagtgttcgtactccgcatctactgcaagctgtttaccaacaacctcaagcggggtgacatagtcaagtttcccagggacgcgatgagcaatgagtgctttgaattggcctatacctggatgactaataatgcgatacatttgccacgtgacaagataataaatttgctcgcggccgcaaaatgtttgcagtgcattcccttgatcaagcgcatctttgagtttcttaacgactaccgaacccattgcgaacttttttcatttagctgctatttgaaggccaaagatatgggtatgacccaggtagccgacatgatggtgtccagagtgaccaagtccttcctggtactagtgtccaatggacagttcattaagatggatatcgacggcgcgtgcactctgctgagatcgagacacttggctgtacaaaacgagatcgaggtatgaaagttacagagtctttattatacccgttactcgtagagtaaaggggtccgtatgaacgccgagatctcaggaactataaaagctagaaagttaaaagttgacatttagtttctttaatacctatataatatataatttatctttctaatgtatttgtaatttttttttatttatttattcagattttttattcagctctgctctggctaatatcaaactatgagatgcgcataaaatacattccacgtgttttgagcttggtaagatttcttatgattccagccgtatttattcttcaatggacgagcaatcttaaagatctccgaccagaacttgcgaatgtcctatgccactttctacacaatgcgatgctgagccaattcgaatattatacggaaacctttcagtcagaatctataatacgcggcaatcggcgctgggctcaggatccacagtgtccatatttatcacttttcaatgcaaacggtgactccgatctctccccagatgtattttttcgctatctgcggcaaatacaaaattcacctaaaagctttgtagctcgattgataatgaaggaccatatggaatatgaaattggtgatgcactgacggtaaacgaatcatggacatcagaaaattccgcggaagatttgaaggagcctggagaatataactgtgctgttggaggtacaagttctaccgaagatttggatgccgctcctaatgtgaaacagaccttttatacttcggcagtcgagttggatttggatttgcttgctaaaaaccattccgtttttgattccgatttggattcttctgaatcctcctctacaaccacatcaatagattcctttacggattgcaaaaacggatctggtactgaagtaaattttcatgcagaacacccagcaaattctaacgcaagttctttctcggactccaccacatgttctggtggtgattccgaaacggaatccgttcaagattccaatgtagc

SEQ ID NO: 42926 - DNA, 706 bp, DROSOPHILA
attttctagaagtaagccttacataatggatgtatcccagtcagatggcccaacagaaaatgaggctggcggaatgaagaacattacacatcagttcgagttcatgtctaataggttgaaggagcatatgaaatacaacatcctccgtaacgctgtgttttacaagaagattcccctgcagaagaaactaaaacttgcccttgaaagaaatatcggtccccatgcctatataatagttaacgatacaatctacaagtgccaagtgttcgtactccgcatctactgcaagctgtttaccaacaacctcaagcggggtgacatagtcaagtttcccagggacgcgatgagcaatgagtgctttgaattggcctatacctggatgactaataatgcgatacatttgccacgtgacaagataataaatttgctcgcggccgcaaaatgtttgcagtgcattcccttgatcaagcgcatctttgagtttcttaacgactaccgaacccattgcgaacttttttcatttagctgctatttgaaggccaaagatatgggtatgacccaggtagccgacatgatggtgtccagagtgaccaagtccttcctggtactagtgtccaatggacagttcattaagatggatatcgacggcgcgtgcactctgctgagatcgagacacttggctgtacaaaacgagatcgaggtatga

SEQ ID NO: 42927 - protein, 226 aa, DROSOPHILA
MDVSQSDGPTENEAGGMKNITHQFEFMSNRLKEHMKYNILRNAVFYKKIPLQKKLKLALERNIGPHAYIIVNDTIYKCQVFVLRIYCKLFTNNLKRGDIVKFPRDAMSNECFELAYTWMTNNAIHLPRDKIINLLAAAKCLQCIPLIKRIFEFLNDYRTHCELFSFSCYLKAKDMGMTQVADMMVSRVTKSFLVLVSNGQFIKMDIDGACTLLRSRHLAVQNEIEV

SEQ ID NO: 42928 - DNA, 2894 bp, DROSOPHILA
tgaaatctcaccccatcgccgtaatctttgggcgttaccgacatagttcgagtgctactgtatctaagaactatacaaccgtcttgttaaccaccatatcaaatgataattccagtttccaacttaatgtaaaacactccattcacatttgcaaaaacaacacaaaaaaaaaatgagacattgcaatttgttgacacccacaaacggttcttgatgtacgtatgtatgtaccaattatgatgttcgtctgagtttttgaaacattaccttgtttcacagatccttgcacacatatcgcacaaaggaaaatatatgcaagaattatatttaatagcatcgacatgcgtcggtagagtaacgccatggcttgctaatttctcactccgagccggataaatacatatgtcaaaaattatattcgatgtctgcgttgagttaaaaagctctactgcgttgaactaatgtcgcggcgagtgcaaaacaccgacaaatgtgttttattaaaaaccagttaatagacggcgaccgcgaataagtattaatcgttattttcttaacactggattgtttttttttcgcgatatgcggcgttatcgataagtcagtcgaatatgtacccttggctgcggttaccaagggatttggaacaactgaattggaatataatcgtatattataataatataatcgtaatcgtatttattaacatgagtaattaataagacacaagtatttatttatagagcagtatgacattaattgttacttaattgttgcaaatttataatttatttctggaatgcattaattcatttattacttcatattcacttttattacgattccgtttggtagccgatatattttacaataccaatgagcgttgctatcttagcacacgatacaacagttcaccgcaaccaccaaattccaagtaaactagccggcattgtttgtgcgcgtttttttttgcagaaaaccaccaaaaacacataaaaacatgaaattagtaaggtatgttatgcgtcatttacctaaactaaaactaaacttgttagcaatgcgtgcagtatagtttcattcagtttttgagttctgcgattctgcacacatgtatgcatgcaaaagcgatgctcccatttgttgtttttgtacacaaaatttaatttaatacgaatgttgttttgatctgttattataatagttttccattatttacttgtatctggtaacaattcttgcactttaagtagcattttgcataactatattcaatgcaatcaacgctcttaatccaaggccaccaaatacaagctacctttaaattcgtactaatttgctaaaagtaaaggctctactaagtatatttcatcataaaggctgcttgcatacaccttattgtatctcatttttcaatcacccaataagatatttgtttctacctataatagccttgcatctctgaaatgctgcatctttgcaacagggatttccttaatttcgtttactaatcttcccgttgatgcattacagattccttatgaagctaagtcacgagaccgtgaccatcgaactgaagaacggcacccagatccacggcaccattaccggcgtggatgtggccatgaacactcacctgaagagcgttcggatgacgatcaagaaccgggatcccgtccacctggagacgctgagcattcgcggcaacaacatcagatactttatactgccggacagcctgccgctggagacgctcctcatcgacgacaccccgaagtcgaagacaaaaaagaaggacagcggccgcgtgggaaatcgcggcaggggcagaggcgcccgcggacgaggtggtccacggggtcgcggaaggggccgagcttcaggccgacgttaatctttgtaacagctacatctaataaacaatattcgataaatatagaatataaatattctttggataaatccacactgtatgcatttactatgtacgaacaactgacaaatgtcttcagctagtaaagaaactccatctgaatatgtatattgttaaaaatcactctgtgtagtagctcaggaaaaatgtgtttacttggcaacaaattgaaagaagactcccgccattaaattatgattaaaaatgtttgaaagtttgtaaaaacgcttttttatacttttaattgtttttggacgcacaaaatgtctttcaaatgttcaacaatagtaggagaaaactgtgttacttaagctaggctatagattcaaatatatttactactgccattaggatgcgtggtgaacaatgaaacaaacgacaatgttaaacccatgaaatgggcatcgccttaaaactggttaacttaagagattctactttaagtaacggattggaaaacatatcaaaagaaacaatagatatagggataatggagtaaccctcactttaaaacccattattaaggacaaaaaaatataagtgatttgtttaagttttcaaaggcaggttgaaccggttccgataatatatcgaaatgtcaaattgtggaacttgctccgatcaattatcgctattcgggttcggatacccgctaaaagtaaggcgccaattttaaatcttaaaatttaaattaggaatgtcttttgataacacaattttttattttatatttttaactcaagttcacaattgctcaagcttcacagctctattgctttcctttgaagtctggtcagagccgggaatttgtatatatttgttcgtttatggtttaattgagaatgtgattttggctgcagctgttgttgctttgctttgcatactaagtttgtttgtttaataatcgtgcaccatatatatacatatatatatacacttgacggttattggatctctgcag

SEQ ID NO: 42929 - DNA, 375 bp, DROSOPHILA
atgaaattagtaagattccttatgaagctaagtcacgagaccgtgaccatcgaactgaagaacggcacccagatccacggcaccattaccggcgtggatgtggccatgaacactcacctgaagagcgttcggatgacgatcaagaaccgggatcccgtccacctggagacgctgagcattcgcggcaacaacatcagatactttatactgccggacagcctgccgctggagacgctcctcatcgacgacaccccgaagtcgaagacaaaaaagaaggacagcggccgcgtgggaaatcgcggcaggggcagaggcgcccgcggacgaggtggtccacggggtcgcggaaggggccgagcttcaggccgacgttaa

SEQ ID NO: 42930 - protein, 124 aa, DROSOPHILA
MKLVRFLMKLSHETVTIELKNGTQIHGTITGVDVAMNTHLKSVRMTIKNRDPVHLETLSIRGNNIRYFILPDSLPLETLLIDDTPKSKTKKKDSGRVGNRGRGRGARGRGGPRGRGRGRASGRR

SEQ ID NO: 42931 - DNA, 2891 bp, DROSOPHILA
caaaactcgtagaagcatttagacgattttcgtatcacttggtacaaaacccctgggtttgtaacggttttttgggcgatgcacagcttaaagcaaatatatatatatacaagtatgcattaccaggctgacgcaattgttgttgtggcgactgcaatttgctctctggcgcagttggcgtcgactgcgctgcggcagaggtggaaagactggtggacgatggggcgtccaccctcttggcatccagcttctgcttcctaagcacctcggccagctgcctatcgagtccagcctccttgagcttgttgaaatccagctgaatcttcttaattattcgcttgggcggagctgcagcagttttggtggcgtgtggaggaggggcgctggtgggattaccgggcttcggttgattagaagtggtggtcattggcgccggtggacccatgatgacctgtttgctggagttgtccatttcgcggttactttaaaaatcgcataagacactggcactgtttattccacgaaaatgacgacagaaatcgaaattcttaaacactcgttgcttcgatttttctcaagtccgacgtaatccacgcagtgacatttaaataaaacacgcttttcgaggcctagtacttgtcaccaacactagtttactttagtttagatcgctgtctagacatttttcactttttaaattctaaaaaagatcaagcatgtgcagctcgaattaatagtgtgaccgctttgaaaaagtaaaatattctcaaagcttcggaacgaaaatataccaaaatattatatgtaattctttaaaaaaacatcgcaaaaggaatatataagttattttatgtatattacagtttgcaaaaatttgactatcattaagaattttaatggatttatgaaacattctattatttatttaatactttaatcctgcacacgaactatcgattgactctgataaactaccacccctaaccgaattggcgtttcttgacaaccctgttctgtacaacaaattttcatgaaattttaccaacgcaaaacgtttttccttcgtgcggttgaaaactaaaataaagtttacaaaatggacttccaaaaccgcgccggcggcaagaccggcagcggaggcgtagcctcctggtcggagacgaaccgcgaccgcaaggagcgactgcgtcaactggccctggagacaatcgatctgaacaaggatccgtacttcatgaagaaccatctgggctcctacgagtgcaaactctgcctgacgctgcacaacaacgagggcagctatttggcccacacgcagggcaagaagcatcaggataatctggcaagaagagccgccaaggaggcaaaggaggcaccctcttcgctgctggcgcccgagaagccccgcgtggaaccgaagaagttcgtcaagattggacgacccggctaccgggtgaccaagcagcgtgaactcagcaacggccagcagtcgttgctctttcaggtggactacccggaaatcacggagtccattgttccgcgtcaccgcttcatgtccgcctacgagcaaaagatcgagccgccagaccgcaagtggcagtaccttctctttgccgccgagccgtacgagaccatagggttcaaggtgccgtcccgcgaagtggagaagagtgagggcaagttctggacgcactggaaccgtgacaccaagcagttcttccttcagttcgccttcaagttcgaacctaagatcctgccgccaccgccgccgaatctacatagggcactaggccccccaggcggattccccatgccgggaccgccacgtcctgctatgcatcccatgttcaatggcgttcatccaccgccacccatgctttcaaacaactaattcatcgacaatgtttacgggatttctccaaacgcaagccgattaccacagaaatattcaaataataaacaattttctacttaatacaactcgagggtttttgtatttgtgtttctagcttaataaattgaaaaaatattgctggttttctttgtagctgtacgacttacaaatcgatcgcgtttaaggtaattatcttggattctataatttctgcttaaattaggtaatgtacaacttattaatacacacttggctggccatctccgttcgtcaattacttttagatcttttcgcgcttcttgaaattccttttcgaagcgcagcgggtgattatattagaaacgtgtggcttatgctcgaagatcttcattaactgattctgtgcctcgttgatgccatcggtaataatcttgctgcgttgaatgtttccctgcaaagtaaattggttttatgttgagattcaagcataatggatataagtataagagcgcacctttagcagttcagtgactcgctcaatttcgctgtgcttctccttgtccttttcgagatcctgcagcatggtctccagcctgcccagactaaagacttccgattcattctgtaagaaatcagttcagtcaaagtagcctaccaatactttcgtgcccattgcttaccaagtcctccatttgcgagcgtaaatgataaattttccatccattgattttgccctgcacatttggctgattggccagatcaatgactgtggcccgccgctcctcccttggcttaacatcagtgtaccgatgaaaatgattgttggccaacttatgtgtgggcttatacgtctgtagatcaacggaatcatttgttaactaccacaaaatgaactgaaccttcaacttacattgagcaaagcacaattgcgcggacgacgaatcacaaagtcgacgggatttgcgttctccttgttgcccgccacagcaggtgtactgttccggtggttggcatcgcc

SEQ ID NO: 42932 - DNA, 891 bp, DROSOPHILA
tgacaaccctgttctgtacaacaaattttcatgaaattttaccaacgcaaaacgtttttccttcgtgcggttgaaaactaaaataaagtttacaaaatggacttccaaaaccgcgccggcggcaagaccggcagcggaggcgtagcctcctggtcggagacgaaccgcgaccgcaaggagcgactgcgtcaactggccctggagacaatcgatctgaacaaggatccgtacttcatgaagaaccatctgggctcctacgagtgcaaactctgcctgacgctgcacaacaacgagggcagctatttggcccacacgcagggcaagaagcatcaggataatctggcaagaagagccgccaaggaggcaaaggaggcaccctcttcgctgctggcgcccgagaagccccgcgtggaaccgaagaagttcgtcaagattggacgacccggctaccgggtgaccaagcagcgtgaactcagcaacggccagcagtcgttgctctttcaggtggactacccggaaatcacggagtccattgttccgcgtcaccgcttcatgtccgcctacgagcaaaagatcgagccgccagaccgcaagtggcagtaccttctctttgccgccgagccgtacgagaccatagggttcaaggtgccgtcccgcgaagtggagaagagtgagggcaagttctggacgcactggaaccgtgacaccaagcagttcttccttcagttcgccttcaagttcgaacctaagatcctgccgccaccgccgccgaatctacatagggcactaggccccccaggcggattccccatgccgggaccgccacgtcctgctatgcatcccatgttcaatggcgttcatccaccgccacccatgctttcaaacaactaa

SEQ ID NO: 42933 - protein, 264 aa, DROSOPHILA
MDFQNRAGGKTGSGGVASWSETNRDRKERLRQLALETIDLNKDPYFMKNHLGSYECKLCLTLHNNEGSYLAHTQGKKHQDNLARRAAKEAKEAPSSLLAPEKPRVEPKKFVKIGRPGYRVTKQRELSNGQQSLLFQVDYPEITESIVPRHRFMSAYEQKIEPPDRKWQYLLFAAEPYETIGFKVPSREVEKSEGKFWTHWNRDTKQFFLQFAFKFEPKILPPPPPNLHRALGPPGGFPMPGPPRPAMHPMFNGVHPPPPMLSNN

SEQ ID NO: 42934 - DNA, 2681 bp, DROSOPHILA
gctgcagcgaaagttggcgacagctaaggatgtcctgattttgggcaatggcggcattgccagtgagttggcctacgagctgaaggatgtaaatgtccactgggtggttaaagattctcacatctcggccacatttgtggatcccggagcagccgagttctttcacatagccatgaatgaatgtaatgcgaaggattcctctccggttgtggctattaagcgaatgcggtacagtgaagtgctgcccaaggagcagactaacaaccatggagctgcattgggtccggactggcatcgcagcgtcgacttgagtggagcacgtgaaggggaagagaaccgcctaccaaagatctattacaaatctcgcataagcagcgttcaggatctcgccgacgacgcaggtgctatagtcaagttggagcatgaggatgggagctttcagcagttgacctgtgactttattgtttccgcaacgggagtttggccgaataccgactacacgtgtgattcgccacttcaattttccgacgatggtggcatatcggtggatgaaatgatgcgtacgaatctggtggatgtctttgcggccggtgatgtgtgcacggccaactggccagccgcaatgcactggttccagatgcgcctgtggactcaggctcgccaaatgggctccatggcgggcaggagtatggcggctgccagtgaaggtgaaagcgtgtaccaggatttctgcttcgagctctttggccacgtaaccaaacttttcggatatcctgttgtcctgctgggacgctttaatggtcaggatttgggcagggactacgaaattctggtgcgctgcacgagaaataaggaatacatcaagtttgtgcttcaaaatggcagactacggggagcaatgctaatcggcaacactgatctcgcagagacctgcgagaacctcatcctgaacggcattgatttggagccctatggcgatgatattcttaatcccgacattgacattgaagactattttgattagtttattatgcgctagcttagagtattaaagacattaaaaataattcgcatcttggagctaactgctaggtttggcttatacctggatttggtgtggctttttttgaccgctgtcatttgagcttgccttcggtgcctgggaattattcgtttaaatggttgattacatgtagttcttaggaaatgtcgaacttttgcaatactcacccacatacttgatctcatcgaaggcctttcgtgcctttttcaactcctcgttcatggtcagaagatccttcaccctagcgtactttcggggatctttgcgcaccaggaagataatgtcttcgacttgaacacggcctgttcgaccgatctccattgcccggtgagtggtctcagctatatactcaatgaccaggtcttccagcagatctacggtttccgtgtatggatttttgtcgtctccgaatccgaacatcatgcagcgcagctccttgctgaataggcgctttcgtcctgagttggtagccacaaattggtcatcctccgcgtcgtcatcaaagttgaactaaaaatggtgattagcttagaatcggagacattggaactggtgcttataatatttccttacatcaccgccctcgaaattctcctctggcatgctatttgaggccatagtgctcagacttcaattaaaacgttgaatttgtatacaaattttgtgtttacgcgagtaacaccgcattgaatgagcattgtaatcgatacttgcagcactgctggcgataattggttgagaaggtagctgatactgagactaactcgaaatagctagattgcgagctcatatttcaaatatctgagcttgtcaacaaatctaaatattttggttcgtgattaaataaattgtgaatttattcaagaccatacaaaatacatctaaaatatatttatataggtgcttaaattatagccacgagtaaaaatctagccaaactcaacacatggttgcactgcgcgataacgccgcccgaacaatcgttatcgaagcctttgcttgcacacgcatttcaaaaatttttataaacgaacacatcgttcattcaaaaggggaaaatggaagtgtttacctttgagaaatcgtacttggagcgcctaaaagaagcggaggcggtgctttcgtgggagggagccgtgatgcccgcatcccaggttcgatccgagtggaaatcctacgtcgaattaaaaattgagcctgcaggtaagccacccacacacacacacacacacactcgtgcacaaaaggcaactatatatacatatatgtatctatatgggatatataggatggcaggcaatttggaaaattccacgcgttatttgcgaggatctgaaactacgctatcccaccattgtttacggctacgtggagcaggtgatctttgacgagctcaaggcggtatttgtggtgaccgccgtgcaggatagcgatgtccacctgccggagagtaatgaagtatcgctagtggagctgtggcccactgtgcagcaggagaacgcagctctaaatgtggataccaccgctgaatgcatcgatcgtttgcggttcttctatacgcatgtgtggatgccttgggacaaggactacgacgatgatcgcgactgggtgcaacagc

SEQ ID NO: 42935 - DNA, 547 bp, DROSOPHILA
atggcctcaaatagcatgccagaggagaatttcgagggcggtgatttcaactttgatgacgacgcggaggatgaccaatttgtggctaccaactcaggacgaaagcgcctattcagcaaggagctgcgctgcatgatgttcggattcggagacgacaaaaatccatacacggaaaccgtagatctgctggaagacctggtcattgagtatatagctgagaccactcaccgggcaatggagatcggtcgaacaggccgtgttcaagtcgaagacattatcttcctggtgcgcaaagatccccgaaagtacgctagggtgaaggatcttctgaccatgaacgaggagttgaaaaaggcacgaaaggccttcgatgagatcaagtatgtgggcaccgaaggcaagctcaaatgacagcggtcaaaaaaagccacaccaaatccaggtataagccaaacctagcagttagctccaagatgcgaattatttttaatgtctttaatactctaagctagcgcataataaactaatcaaaatagtcttcaatgtc

SEQ ID NO: 42936 - protein, 136 aa, DROSOPHILA
MASNSMPEENFEGGDFNFDDDAEDDQFVATNSGRKRLFSKELRCMMFGFGDDKNPYTETVDLLEDLVIEYIAETTHRAMEIGRTGRVQVEDIIFLVRKDPRKYARVKDLLTMNEELKKARKAFDEIKYVGTEGKLK

SEQ ID NO: 42937 - DNA, 3639 bp, DROSOPHILA
tcagccggaagccatactaagtcctgctgcagatctttccctgctgcctgtggtgtgctcgagcgatgaggatagcaccctgctggtcattgatggcgactataccttgtcggaattggttttggattgtcgtcatgtccgtagagggatcctgctgcgcaacggaacgttgaccatgcgagggtgtcgcttgctgggcgatgggagctccagcacccaagagggtattgtctgcatgccaggcgccagcgtggaactcaaaagttgcctaattgaaaactttgctgtgggtgtatcgatgcgaccgaaatctagtgctgagctgggaagcgtccagtttaaaacatgcaagactggactggagttgctggagaaatccgcttcggttaatctgcagggtagcaagtgcagttttgaaaactgtgctttaggaatcctggccgatggtttcgtattgggagagcaaagaacagagaaggtcctggttctaaacaaattcagcgaacttcagcggtaaatgaaaatacgttgtattttacatgttcaaaaattaccacttatatccttattttttagttacaacgaggacaacttgctaggtaattgcagcttttacaactgcaagaaaaatgtgcgagtttttaacgaatccggtcagctgctggctcagcgatcgcatcaacaactcctcgaggacgaactcggaggggagaacaaggaaaatattcaattggtctaggggtacattgtgtacacatagtgtttataaattaaaatttagcgctaaccgaaaatcctattgatatgcgtcaataaataatacgggcaaactccagtgtctcgatgttgcaatttcgttggatgtcctattctcgaaaccttacatattggttttaactcttgataaagttagttaatatataatattacaccgtctcagagcgtcttccagaaaatacttcctttaacacataaatactccgaacaataacctgaatttgtttacagtaatttcttttaataaaaacatgttaatcattagttggttaagctttctgcttctgctcctggccgtagtactcgctgtaatcatactccctgaagggcacatcgtatgttaggtacccggagtcgcgggcttgctgaacggcgaccattagacgcaggtggctcttttgacacaggcctgtctttgagtagctaaggacgtctccgctgtggggcgatatgaactgctccaggagctccgtgttgcggtagtccagcaccaggtattcatcacggcaaatgggacagggatttccggtgctgatacggttctggcggatgcacgtctttcgtgttttgcgcggcgcatacatgcccttgtggttgcgcctaaagagattagatgcgaatgcaatggaagttttcacgtgtatgccttcagttcgtcttaccgatactgcgtccacacaaagtcctcgccgtaggtttgcttgtaagcggcgctctttaagtatcgaatcgaggtctccactgggattggtttgctgcgatccttcgggtctggtgcggaaccactagcgttatcctcgccttcgccttcggtggcagccgcattattttcttcagtcgaagtctccgccttgcatctcaaggcgctggccgtgtgaagagctccccggctattccgggtaatgttgaccagtccaatgtaaattccacgtgcaatcggcaacattttaattgaataaaacctgaagttacttcaaaaaattcagaggcgacgtaacaaggtaaattcgtggagccggcggatcagctgttttccgatacatgactatcgatacattcaggggcggaacatttctcactagggtattccccgagaaaagtttattttaataattattaaagtaattttaacttaaactttgactgttactatctaaaggctgcccatgctagaaacattttcatagaatatataatctgttctataaaatactaaccatattaaaaagcttaaaggattgagcagctatagaagtgtcggcattacccttaatatattacaactcaatttttgtatcaaatgttcaataactctctttaaaatagaaaccaatataacgctattgaaggttgcggttgtagttttaaatttcttaatcataatttgcatttgcttaaccgtcaaaatttaaataatttttacaacgacaaaaggactaaagttacagactgtggcgtttgaaaccgctaaattgaacggtgagtagggcaacatggccgaaaccaaaccccaaatggcctctcaaactaacggtaaaggccgacacacacgctggcacccatacacacgcgactttgggggcatgaatgaaaatggctgcgccgtacggttcggttttcccgttagtttagtttctttcggaatttactggtgcaaagtagcgatactattactgcagctcccgcgcccgcgtgtatgtgtgtgcgagagtgcgctgcgtgcgtgtgtgtgtgtgtgtgagtgagtgtacggtggggcaaccttaaatcacgtgcatacaaaaaccgaatgaaaaaagcacggcatttatttacatttggatgccaccataaaaaaatagagcgccgacgcctgggttcggtgtaaatcgacgttagtaaatgcctaacaattccttgcgtgtgcacatgtttttggtcccaatcaatacttggcagacggtcatttagatttaattgttgcaagaaataggcctcgagcaacaacaaattttgagcgccgacaataacaaaagaaacaccggcgaagcggtaagtaattttcgcttgccttaaaaatagagccgattgcaggtttcttatcaatttgcgaaaagtcgcgacaacaaataaacagggctataaataccgctatgccaactacaaatgtttaaaacaagagcgcagttggggtgggcaaacaaaagctggtggctttgtcacccgaaacgaaaagagtggacctttttcgaaccacctgcctttggaaaacgaaaccaactttcccatttggagtgtcttttcgcgcatttcgtgtaataaatggttcctttcctgcggcgccactacgaaaatcgtgattatgctgtgccaaattattacctgttggctgtgcgaccttttctatgcctttcgcttccaaacaaatgaataataagcaaggtgggcagctcgaaggtcggattctctgttttggtcagttcttaaatttttgaaaaacttctagtgttcattgggtttttattgcaatggttttaaaatcacttgaaaaacgatgcaaaaagcaactcttataattattcaattaaccaagagtcatcaatttaataatatatttttatatttttgtaattcttccaatgtaaaagttaaagttgtgtaagtgctgcttagttaaaaatagattgcttataaaaatatatagacgttaaaagacgtcagatatatatgtatatgatatacgtaaaagaaacgaccaaacgatattagttcacaccgaacaaacattttcattaaaaattcttgcaagaagggaatttttgatttgtttttggttagcggaataaaactatattaacaaactagttgatggaacccattggt

SEQ ID NO: 42938 - DNA, 708 bp, DROSOPHILA
ccgaacccaggcgtcggcgctctatttttttatggtggcatccaaatatgttgccgattgcacgtggaatttacattggactggtcaacattacccggaatagccggggagctcttcacacggccagcgccttgagatgcaaggcggagacttcgactgaagaaaataatgcggctgccaccgaaggcgaaggcgaggataacgctagtggttccgcaccagacccgaaggatcgcagcaaaccaatcccagtggagacctcgattcgatacttaaagagcgccgcttacaagcaaacctacggcgaggactttgtgtggacgcagtatcggcgcaaccacaagggcatgtatgcgccgcgcaaaacacgaaagacgtgcatccgccagaaccgtatcagcaccggaaatccctgtcccatttgccgtgatgaatacctggtgctggactaccgcaacacggagctcctggagcagttcatatcgccccacagcggagacgtccttagctactcaaagacaggcctgtgtcaaaagagccacctgcgtctaatggtcgccgttcagcaagcccgcgactccgggtacctaacatacgatgtgcccttcagggagtatgattacagcgagtactacggccaggagcagaagcagaaagcttaaccaactaatgattaacatgtttttattaaaagaaattactgtaaac

SEQ ID NO: 42939 - protein, 204 aa, DROSOPHILA
MLPIARGIYIGLVNITRNSRGALHTASALRCKAETSTEENNAAATEGEGEDNASGSAPDPKDRSKPIPVETSIRYLKSAAYKQTYGEDFVWTQYRRNHKGMYAPRKTRKTCIRQNRISTGNPCPICRDEYLVLDYRNTELLEQFISPHSGDVLSYSKTGLCQKSHLRLMVAVQQARDSGYLTYDVPFREYDYSEYYGQEQKQKA

SEQ ID NO: 42940 - DNA, 2419 bp, DROSOPHILA
ttattattccaatttaaagtaagctcttgccccagttcgttgagctctaaatagtaaagggtatgcataatgcagggtatgaagagaaaaattgctccgcaattgaagctatcaaaaaggagcttggccagttaacccaagacagcgagttggactcaaaaacgaagcagtggcaaagcgcaaccaaatttccgtttcggtagtttttctcttttttttattttttattatttgtttttttttttgctgtgaggatggggactgggtgcaggaaaaaagtcatcatagcctgaccttcattgttgagttgcttctaacatttaaatttgttttgcttttccattattttcgggctctgttgtgctgcttttgttttggcttcttttcgatttcaacagaaaacgtgccaaatttggctgccagttggacgttccccccccccccccccccaaaaaaaatttaatacagttcagctgggttgggcattggctttggctgtagctttgacctggtctccgttccaggggctatggtcttttgtctggccacaagctcttgacacacatccagacattcggtagtgtcggccttatcgggctcttatcagctggttgaaaattgttagagaagccaaaggcatttcgaatcgggctatgaattcagtcggacgcagcttctcccggtgaaatgtggcttctctggtttattctccacctaattggcctcatccaagggcgttctgtgggcggtgggtctgtaaacttggatgacgaggttagttttgccctttaagttttgctttatttgttacatttttgtatttctccctatagtttttcatgcctcagccagatcccacaatatttgcctacaatcaaactgataagggatcatcaccctgggacaatacctggaactgaatacttgtaaaaaaaaaagtgacttgtaattgtaataaatttattttatttaataaaaattatgtagcttctgaagtgccctaaaacctgaaggtatacactccaccggctccccactgaggccggctgttgccatagggtccaccaaggtgctgggcatacgatcccgtggcatcgaaggagtggcgtccattggggctctgccaaacgggagcacgtccgttgaggctcagatcgaatccttgctttgggcttccaccgccaccgccattcaattggaactggcgacgcactctgtgcaggggcacatcaaaattgggagcatactagaaaaatactctattaaactgtgctccaagtgaaaagtttcataaaaacttactgccagtggttcaggctgcagattcacaatctctcggggatcaggatagggataagcccaggcactcgagaaggcacaagccagtccaatgaatagaagactagcggtgaaatgcattttgatttgattaggctttgtcaactgaatgcggctagagtcgaactcaggtcttatatagctcggatctgtgtcttatcagtactcgcagatgagattccccaattgggaatccctgtcaagacgacggtgcagtggttcaccagtggatccccacatttcgttgataagaggtacgtgtaggctcctcaaatagaggcagatgccaaagtgaatcccatctagaaacaatgaatgtagaggtactcgcatttcgattgggatccattcatgtgtggcagctgtgaaaataatatatgtatattaactactacaagctaattctatttcagattcttaggctaacattaattctttctaaattaattctttctaataaaaaagagcattatacgaagagttatatttcttttatgcattctagttaagatgcaaatctatgttttatcattttaacaccaactttctttctggtaacctgagttttatgcatatataatacattttcattcaacatatattctatttttaatcatctccaatttcgtgttttctattagtaagaatatcggatgttactttcgccaaaatttgatttcctcccaagcaaaattaccttacaggttccgcagacccaagcagaatttagtttcccaaatcgattcatcattttacaaggtcaactcaatttggccattcttagctggaattaatgatgtgaaaagctttggtaatccccaaatttggttgtaaaagagtttagaatacagcctctgcacgaatcatttttcaaatactcgaagcgaatcttattcgctttcgttggggatggcgtaatattttaatcttcgggttaggctgcggatgttgcgcatgataaatttccatcgaaggttctctcgacagtttacgcaataaatccaattagcaaaaaacattttgtcttggcaggtttcattaagaccgcctgtcatcgtaatttgttattacccaacggagt

SEQ ID NO: 42941 - DNA, 363 bp, DROSOPHILA
atgcatttcaccgctagtcttctattcattggactggcttgtgccttctcgagtgcctgggcttatccctatcctgatccccgagagattgtgaatctgcagcctgaaccactggcatatgctcccaattttgatgtgcccctgcacagagtgcgtcgccagttccaattgaatggcggtggcggtggaagcccaaagcaaggattcgatctgagcctcaacggacgtgctcccgtttggcagagccccaatggacgccactccttcgatgccacgggatcgtatgcccagcaccttggtggaccctatggcaacagccggcctcagtggggagccggtggagtgtataccttcaggttttag

SEQ ID NO: 42942 - protein, 120 aa, DROSOPHILA
MHFTASLLFIGLACAFSSAWAYPYPDPREIVNLQPEPLAYAPNFDVPLHRVRRQFQLNGGGGGSPKQGFDLSLNGRAPVWQSPNGRHSFDATGSYAQHLGGPYGNSRPQWGAGGVYTFRF

SEQ ID NO: 42943 - DNA, 2605 bp, DROSOPHILA
cgagtaacatcccaattattatcaactaagaaatggttaatttaatttacctctaccataaaatcatattttaaagcctttgcgcagttcatgtccatacccaacatctttgtgatgcacgtcaactgccaagtttaaagcagaataaataacttgaacgtgccaagctcacaggcaaagaattcgacttgtcaaataaacaacaatggaaatcagagttccatgtgtgggaaattttcggagaaaggccccaaaaaagtggcacacacctgacaacgaaatttcgattagcacaggaaatactacaaatgtggatatgctcatgtgtgtgatatgcatgtttaaggaatagttcgtacacatttctttgacgtggccataaaagagtgaacaaaacgtgccttatcagccgcaaagctgcaacaacaacaaatggtgacaaacaaagggagaaaaccgtaggcgattttttcgagaaaatttttcaatatcccaaacgtcggaaagggcgcaaaatgcagatgacacgaatcacaaaaaagacttcagaaaacaaaaaaaaacaattcgtttagcatatatgcatagtttttcgtacggaaactaaagaacatgctgtggtcaatttcctcgactaacagataccctagcttcagtttcaaagagaagtttcaaagttggttataagtatcgatcgaaattctccaaaagattttgttggtaatattacaaaaaaaaattttatatttctaaatccttattaacaagatattggttaccaaagcgttctaaaatcacttcaagaatgcagacctttttttagttctcatgagtaaatcataaattcaaaagcgtaaacaaacatgaaactgacatttttgctctgaggtcagacaactttgacgactgctgtcgtgataaggatggtttttactgataatgaggtagatgactaatgagacaggggtttcatgactgagggaaacaaatttcagaagaatttttaaatttttagaattcttctttgcttttatttaatttatgaacggttgtattgctgtagacgaccggactctggtagagttttacaaatcgcatacatatcccttatttcaattctagaatctagggtaataccgttctccaaatctctgaaatcagcatttgggcaaatcgtggccaggagccctatattcctgttcctctcaccagacctgcgccttctgacagcggactccgattcttcctcggatgccatgatcagcatagaagacgattccattgagctgtccattttatcgttaacattctcattgctaccatccgtgagctcatcatcttccgtgctgttactagtgtccttggtagctcgcttgctgatagttttctcgatactgctcttcagattctgctgcttcgatagctcactataatcattatactcggaatccgattcggagtcctcccaaattgggggcaaaggaagtgccgcgctcagcacaatggcggagattaggaacagcaaaacagatcgacgcatcccggtaatctttgtatatcctggtaaactccactattccactagcttgatgggtgggttcttctcgctgagactgattttttcgaactgattctggacagctgcacacgttaccggcgaagcctcaacaaatgtgctatcgcctcctcggcgattatgtgattatagactcaaattcaattgagtcaggcagatagtgggtttcagaaatgactctttataatgcatgtagattgaaacagacgcacttagtcccttaaaacagacacgtaatgcataatttgacttacacaattaaataagctaagtttcaatgttaggtgagctaatttccaaatgcatttcaagtaatgaaaattgtaatagttaaataatatggcaaaattaattattagaagaggaaaatatttcttgttgctgatatttatacgtgttactcgtaaacttgaataaacacaccccataagttaaaaagtaaataatacataggcaatagcctaatctcttgttttgatgactcagtcattataataatagtaaaaatgtaatatggctacgaaaacataagctataatgttatttatgtttattcaaaatcattcggcataggtggcctcgttggcctctttggagctaacctccatgacctcgcatccctgggcgtagtcttcgatgctggtgttgtccttgtccttcaaaagctccgccacagcctgcgccatctgctcgtccagttccttctcagcctgggcatccaggtccggcgcatcgctggatttctgatcggcagcctggcgtcttcgtctagactccctttgcttacaaaagcttacggcccggtcatatgcagattgtagattgaaattcttaatatcgaattctttcagtgactggcaaaaggatcgcaccatcgtatcctccgtgcttctgcgtttcctagcagtgtgctccgtagttgtttcttctaccgcagctggtgttgtcttttcctcggaggaggaatcgccggagctgtccgccttgttcttggccttgtctttggctttgtcattatgctcctcagat

SEQ ID NO: 42944 - DNA, 605 bp, DROSOPHILA
agaagaacccacccatcaagctagtggaatagtggagtttaccaggatatacaaagattaccgggatgcgtcgatctgttttgctgttcctaatctccgccattgtgctgagcgcggcacttcctttgcccccaatttgggaggactccgaatcggattccgagtataatgattatagtgagctatcgaagcagcagaatctgaagagcagtatcgagaaaactatcagcaagcgagctaccaaggacactagtaacagcacggaagatgatgagctcacggatggtagcaatgagaatgttaacgataaaatggacagctcaatggaatcgtcttctatgctgatcatggcatccgaggaagaatcggagtccgctgtcagaaggcgcaggtctggtgagaggaacaggaatatagggctcctggccacgatttgcccaaatgctgatttcagagatttggagaacggtattaccctagattctagaattgaaataagggatatgtatgcgatttgtaaaactctaccagagtccggtcgtctacagcaatacaaccgttcataaattaaataaaagcaaagaagaattctaaaaatttaaaaa

SEQ ID NO: 42945 - protein, 166 aa, DROSOPHILA
MRRSVLLFLISAIVLSAALPLPPIWEDSESDSEYNDYSELSKQQNLKSSIEKTISKRATKDTSNSTEDDELTDGSNENVNDKMDSSMESSSMLIMASEEESESAVRRRRSGERNRNIGLLATICPNADFRDLENGITLDSRIEIRDMYAICKTLPESGRLQQYNRS

SEQ ID NO: 42946 - DNA, 3145 bp, DROSOPHILA
caaatgagctgtttaattcccgagctgtttgttttaaaatctgccatcgaatgcgagctttgctggagagaaaacatttacgttgtgcatgccaacaaggctctttattcacttgccgactcaatgttgcatgcacttgcaaacaattaacagaaagttgcagttggagttcgaagttagggaaaaaataaagttcaaaaaattccaaaaatgtgatgttattctttattaaatttggagaaatatttgaacaatgacttatgtttaaaattttcaaaaattattaaatttataaaaaaatgaattttgcgcctaaattgttaaccacatttataatattaatacaatttaaattcaaatacaattcagataccatatataataaaaggggatcttagctattcttgaaatgatacaaccgtgtgcaagagttctaaaaataagtgtaaactccgaggaacattttttggcaccgtcatcgaccttctccgcatcctgcgtgactcgtaggtcctgctgttggaggaataagtgcattgcgttggccttcagatggaatttatggtgcggtgggtcacaaataatgcataaacctggccaagttgcaagtgccggttgaagagcttggctctggtctcgtttgggtttggatttggctgtggttttgtcttgattttcagtctgcttgcgtttgacttggcagtgatttttttggcatacggcagagtgcactttaattaaaaattttacccgactgaaaggctgggtgtgaagcgtgtttgaatagagtttcgaatatgcctgggtgtgcggcttttaattgaagtgctgctgaagttgaggctgctgttgtcgcctgtgtatttgcataatgaactcaattaaaagttggccacttcacaccacccttcgacgcccagctgtccccctctgaggttaaacttagactaatggcaggaactgtttaacatgggtttgactccttgctcccttcacgaactcactcctttttgtccttcagcagcagctgcattcgctgtcccaccaatcccagtggctttcgtggcaccaaatggcaagtggattgcctgaattaaatagggttttaattagggctacatacatggacatgtgtccggattcaccacttacttgtatatgatcttctcgcggtctgcccagggccaggatcgttccagtttatccagtctgaatagcaactataagaagagttatgattttatgcatatgctgataactattaaccaaaacgattcctaagaaaatagttaaattttgaattccttattagtttactaccaatcaaaataataacggtcctcctaccagactttgtaatcgcaatcgcttgaaatcatcataaattactgcgctgattgaaatatgcggtggcattaccttttgtgtctgcccctcggcggattcttgaggtggagccttcggtgtgggcgtggctgggcgcaccttcggtggctccggttccagacaaggctgcttctcctgtggctgctcctgctgaggcacctcccgcgcctgatgtcccagtgtcagttcaccttcggcctcggcatcgttaattcgcagcttgggcacattgcggagattccacgtgtaggtggtgttcaggaaatcgctgtcatcctcgtcctccgtagaagaatacgtatcctcggcggcggccgctggcagtttcatgaaatataccgtgctgcccggctcatcctcatcgtcggattccgtgtcatcgctcgcctcatttgccggataattggcttccgatgcataatccgattccggcgtgacatccttcagcagctttgattgcttggcacctttcggtacatccacgtcctcagcatcctcctcccgaaccaacaccaaatcttcctcatcactgtcagtgtcacctgcctgttccccgttcctcagctcaaagtcaagggcatcctcgtcgtaggagaacttccgctgcacataggcctcctcctccccgacgtcatcctcatccacctccgattcactcattcggccaaaattctgcgacacggtggccaaagtggagcacaggattttcggtatttcggcaatggctgacaactttcgctgcatctccagcagacgcatctcgatggagctggctcgaatgcgtcctaaatggaatccattaaggagtagtggtattttggggttttcggggggtttctttttattaaagcgacaaaaacagacacgaaatattcaaaattatgtacaagtatgaaagagttagggaactctacacaggggaaaagcttcatctaaatcaagactatttattatctgagattgtaatttatagatagaacaattttgaacatttgaaatgcttcattctctatcttgaaaaagattctaactagtaatttgcagctataaattatatttaaagaaatttcatttcaaaatgtttacactgaactaaacattatatcttttacatatttggtgggtaataaaaacttttgactggcattttttctcagtgcaggtgtagggatgcgacagcttctgctgccagggataagccggttagctgggtgaacggctcctcacttggccttggaggcgctgggcagggccatcagcatgttctcaatggtgttcgtgcgcagctcctggttgtcgcccacctccgcaaagaatcgccggatgttccggatgatgcgatggtggggcagctcctggatcgcggaaggattacaccgggaggggcatggagaacacggagaacacggcggaaagaggagaatggaaaaacggaatgtgttaatttcgatggcagagttgttggcatgcaatcgtgtggttggttcacctgctcctcctcgtcggacgactcgtcctcgctgagctcaatgaccacctcgttgccctcgtcgtccagctgcgttttcgttttctttttcttgggcttcggcggctccggagggtcttgccacattatcggatgccaacaacgcgagccaagcaggggggttggggtgaattctacaaaaagatacaaagccaagtgagttcggggctctacacaggaaacaactggggactatgaaacctaatgactacatatttacattaattgtta

SEQ ID NO: 42947 - DNA, 882 bp, DROSOPHILA
atgcgtctgctggagatgcagcgaaagttgtcagccattgccgaaataccgaaaatcctgtgctccactttggccaccgtgtcgcagaattttggccgaatgagtgaatcggaggtggatgaggatgacgtcggggaggaggaggcctatgtgcagcggaagttctcctacgacgaggatgcccttgactttgagctgaggaacggggaacaggcaggtgacactgacagtgatgaggaagatttggtgttggttcgggaggaggatgctgaggacgtggatgtaccgaaaggtgccaagcaatcaaagctgctgaaggatgtcacgccggaatcggattatgcatcggaagccaattatccggcaaatgaggcgagcgatgacacggaatccgacgatgaggatgagccgggcagcacggtatatttcatgaaactgccagcggccgccgccgaggatacgtattcttctacggaggacgaggatgacagcgatttcctgaacaccacctacacgtggaatctccgcaatgtgcccaagctgcgaattaacgatgccgaggccgaaggtgaactgacactgggacatcaggcgcgggaggtgcctcagcaggagcagccacaggagaagcagccttgtctggaaccggagccaccgaaggtgcgcccagccacgcccacaccgaaggctccacctcaagaatccgccgaggggcagacacaaaagttgctattcagactggataaactggaacgatcctggccctgggcagaccgcgagaagatcatatacaagcaatccacttgccatttggtgccacgaaagccactgggattggtgggacagcgaatgcagctgctgctgaaggacaaaaaggagtga

SEQ ID NO: 42948 - protein, 293 aa, DROSOPHILA
MRLLEMQRKLSAIAEIPKILCSTLATVSQNFGRMSESEVDEDDVGEEEAYVQRKFSYDEDALDFELRNGEQAGDTDSDEEDLVLVREEDAEDVDVPKGAKQSKLLKDVTPESDYASEANYPANEASDDTESDDEDEPGSTVYFMKLPAAAAEDTYSSTEDEDDSDFLNTTYTWNLRNVPKLRINDAEAEGELTLGHQAREVPQQEQPQEKQPCLEPEPPKVRPATPTPKAPPQESAEGQTQKLLFRLDKLERSWPWADREKIIYKQSTCHLVPRKPLGLVGQRMQLLLKDKKE

SEQ ID NO: 42949 - DNA, 2525 bp, DROSOPHILA
tcttaacaattgctcgggcatctataaacataattaaagaaactctggcaaattaattcgagttgagaatttaacaatttgccgagcaaaacttttccccaccgaacaataaacaatcaagttggcttcaatggcgactggcaactggaactggcaactttttaatcaagttgaggatgcaaatgccggatagttggtttatatggccacctaattggccggcgttaataatatgtgcttgttaccgactgttaaattgcagagcaactgacgccagtgattcaatttgtcagctgcttgttgggacgtccttcgtcctgcgagggatgggtttcttgtcctcgactgatgtgacttttagtgccgggcttaattaaaaaccctgttggagtaatcgccggcgtcttgtcatttagcttcctcgctccttgcaagtagttgcaaagttcgatttttgtcgtctgcgtctgcggtcgtttgccccaaagtgcaaagcgttgtcctccgtaaaaatcagccaaaggatgagccgagccacgcgacacatggcttccacttcagctcatgccatcccatgccatccaatccaagcccataccatgccatctcatcccatcccggccagactctcttctaattgagttgtacaagtcgactactaattgcattcgatgcctggcgctcggcgttgatataattaaattttattggccggcgaagaagcttaaggtgttttccggtcagatttatcgtcgttcattttaattaaagtttaatcgtggcggcgcccgctttgccccacctgtcaatccctttttccggcatgggggtgttatctaaatttttagttctacaaaaataaccacccaactgaaatcacataaataaattgaaaacaaaatacccagacacgaagacactattacacgatcgccacatatacaatacattgaaagacataacatttagaagactagacatagagaatcgaacgggcataatggtacagcagggcctcgatgcgacgaactttggtctgcggagcgactactccagtgagaacggcgatcatccatcgttgttcgatacgattaaggatggggatcagccggatatgtgtgccttttgcctggatcgcatacagaatccagagaagctgcactgcaatcatgcgttctgcaaaagctgtttagcactgtacagggaagctcgcaactgggtggccaagcgttgcccaatctgtcggagcagcctggacatggatggccaggtgtccaggcagttccacgatgtaagtgctccatgggtaacttttcgtagcactatcaagtgactactaattagtagtggcggatgtgaaagcattacacttaaacttaaacgttaaaagatgtgtccaatgacaagaaagtacctatcctaatcccttgatctcctccagaactggcgtctatttggtattatgatggtaccgctgatggtgctcagtctgggccccttttatttgctgttgctttactggtgaattcgtttacgaaatatgtatatttgtattaagatagatctatgcaaacttgtcagtggattttaattaaacgaaaaagacataaaatgcgactggaatgtgctttgttctggctcgtcctttgtcctttgaccaccttaatgagtttttagccaacaagatagataagcgttttcttagaaaagctgcttgaatggtggaagcccaagttgctggtatcacgattgctcatacgccctgtggtcgccatgcccccattttagccacgttttaattcaattttatgcgccaataaactgatttggctgcttgcacaaaaagtgctgccacgcatgcatattgcaccgaaaggaaaataaatcgatgctgaatcagccctttgccatacatataccaatatatctcgatatccacgaataccaatattttgtgggcccttatttgtgtttattttgatgctgtaaatcaaaatgtagctcgcaaaaaagttgtttatattatacaaatattgttgcactttaaaatgaccaacaagtaaatattggaaaatgtgaatattaaatgtttattggccaacacatggatcagttgataccctttgcggtctgcagcttgtcacttggtttttgtatttaattgaaactattttaagttgaaatattcttgtgtgacaaatgttattggatactttggagtgtttaaatgagatttctgtgcaaagatttaagtttataaattctttaaagaaatcttaaatatctagcaataattttacaatatgtttattacttatgcgtttcatttccttgtattattttaagttaagtaatgacattatatttttaatcggccacagcaataaataaattccattgtattcaattgaaagcttaaatctagggtaaaatgcgatttattcagcaagcgcctgggttttggcattcattgttttgggttttggccatgttttgggccacagtttgttcatttggccataata

SEQ ID NO: 42950 - DNA, 375 bp, DROSOPHILA
atggtacagcagggcctcgatgcgacgaactttggtctgcggagcgactactccagtgagaacggcgatcatccatcgttgttcgatacgattaaggatggggatcagccggatatgtgtgccttttgcctggatcgcatacagaatccagagaagctgcactgcaatcatgcgttctgcaaaagctgtttagcactgtacagggaagctcgcaactgggtggccaagcgttgcccaatctgtcggagcagcctggacatggatggccaggtgtccaggcagttccacgataactggcgtctatttggtattatgatggtaccgctgatggtgctcagtctgggccccttttatttgctgttgctttactggtga

SEQ ID NO: 42951 - protein, 124 aa, DROSOPHILA
MVQQGLDATNFGLRSDYSSENGDHPSLFDTIKDGDQPDMCAFCLDRIQNPEKLHCNHAFCKSCLALYREARNWVAKRCPICRSSLDMDGQVSRQFHDNWRLFGIMMVPLMVLSLGPFYLLLLYW

SEQ ID NO: 42952 - DNA, 1898 bp, DROSOPHILA
ttccttatttcagttctcagttccttattttaaatcattgtagatctaactatgagttgcgtgacccttacagagtattatgttctgattataatagactttatcctaatatctgtaatcttgactctctgccgctcacaaagcaattgattttacctttttttattttatgattagatcctactaacagtaatatttaatatagttattttatattatattcatttcctcgatcctgttctcttttttatatcgcgtctatcctctcgctaatcgaggcgtacgatacacggcagcgcccctcgttcggttggtcgggaggtgtcgccgttggacccgtgccaaaaaaaaaaaatatataataataatataaaataattgggtctgaatacggattatttttgttttgatttaaattcttttatttatcgatattttgatgtaatatagaatcgttttttaccaatttctttattgtcatatgtattttagtcagtgtgaaagggtcttattttggccataattaactaattatattttacgttcaagaaaccctaattacgatgaaattaacattttgttttaaagttgcccatatgttgtattcttagatataatgatctatttagccatgttgcggaaagggctcattatcaggaattgaacgctggcatagcatgtacaatcattattataattttggcaaacctcaatagaataaacgtattatgaagtagttttagtaaataattaacattgaaatatgattttttttttatttttaaaaacttatggttagcaaaaaattaaattattaatgatgaagcgtttaaaaatgtgacctaactatcgttgataatgatattcttcagttatcactatttcttgtgtgctatcgatgtttcaaataataaatgcaactctgttcgtatgaacagaacacattgcatgtggaaattattaaaaaatagtttttgaatgtaaagataaagctggaattactgcttcatttttataaataaatacatttttaaaatacacttaaagtggaattcttaacatttgtattttttgtacataatcacgtcggataggcacatacaaacatttgctcagcttatcaaaatcgtctaaaatattttttttagtcgtcggatcgattatctgcaatcgatgctgatgccggcgccggctagcaggctgcacctgcacaggttgcggttgcacacttgttgtcattacaccaaccccaaccattggtggcacacccacttgccccattgtactaccaggaccgccaacgcccattacagtgctggctcctggctgcactgtgcttgtgagcaattgaatttgcgacgagctagcccccggaacagggagaggtccattgggtccagactgcactggctgcaaattgtttcccacattgacgttcgtatttaccgtgacagcactacgagtatgcggcggctgttgctgaagagttgggacatattggtactggtagtatggcatgggggcgggtgcgtattgcaaatgagaagctggaaatgtttgttgccgtgggttatattgtgtgtattgttgtagcaccatgttctggtgaaggggttgtgagtacatgggttgcacatggacatgccgtgttgctccgccactagcacctctaggggcattaggcgtcgagggtggtcctcgaaatattccgccactttgtggattagaacgggtattcccagaattgttgtttcccgttgatacatactgaaagtatttaaaagaatttaataatcagtaagagaaagaaatggattggattattattattattattataaagataatgcagtgaagaatgtaaaacttaaataatcagaataaatatttaatatata

SEQ ID NO: 42953 - DNA, 5489 bp, DROSOPHILA
actgcttcatttttataaataaatacatttttaaaatacacttaaagtggaattcttaacatttgtattttttgtacataatcacgtcggataggcacatacaaacatttgctcagttcttttaatttcagagacctctctggtagctgtatatcaatatatttccagaatcaaatgattgaatgacgtcgtatttgtgggtccaaaatcaccacagaaatcgtctatgaaacggtaaatctaaccgtttggcgatttcctacagagctaactctaggaatacacatacgtaatgcaacaggctataccaactttaccaacacaatcagatatagataaagccatgcagccccattcagcacaaaatatgtatgtatcaacgggaaacaacaattctgggaatacccgttctaatccacaaagtggcggaatatttcgaggaccaccctcgacgcctaatgcccctagaggtgctagtggcggagcaacacggcatgtccatgtgcaacccatgtactcacaaccccttcaccagaacatggtgctacaacaatacacacaatataacccacggcaacaaacatttccagcttctcatttgcaatacgcacccgcccccatgccatactaccagtaccaatatgtcccaactcttcagcaacagccgccgcatactcgtagtgctgtcacggtaaatacgaacgtcaatgtgggaaacaatttgcagccagtgcagtctggacccaatggacctctccctgttccgggggctagctcgtcgcaaattcaattgctcacaagcacagtgcagccaggagccagcactgtaatgggcgttggcggtcctggtagtacaatggggcaagtgggtgtgccaccaatggttggggttggtgtaatgacaacaagtgtgcaaccgcaacctgtgcaggtgcagcctgctagccggcgccggcatcagcatcgattgcagataatcgatccgacgactaaaaaaaatattttagacgattttgataagacaaaatcaaacacagacaatgaattttccgatcaggtaacctccacaaacacaccagcaactgtcctttcagaaggtccaatacgtattccacagcaagaaagtgttggtttaaataatttgaccagtacatcatcacaaggatcagaatcacggacaaacgcgccttatatccccattgaaacaacaccaataagtcgaacagatgttgggccgactccaatcgtatccgcgatgactgatgctccttcggttgaaatattaccaacgccccaaagagggagaagcaaaaaaattcctatagtgtctcctaaaaatgtatctgagtccatagttgctcctatcactgatgaaacggatgatgcagggtcaacaccgatatccagagccactgaagaatctatgccacctaatcagacccatccaaatttactcatatccgattcatcaaaacataagcaagcagtatcaaatagtgagatttcaaaagacgctcctactggtttaaaggaaatgcatgttgctgagctggagtccagtgtagcctccgaaaatcatccagctggaatactagatgtcaatgtcaacaagagttcacaatcattggatttttctgcagatcccgaaattgatagtattggcgcaatatcacctacgagtccaaacgcagtttctcctattttacacgaagttttagataatactgagttgtcaaaaaaattagagaattctacgacagaaagatttaaagatagccaaagcgtagagaagccaactcatcaagaactaagtttaagaaatgccacagacgagactgaaatatccgcaatggcattacaagatgtgaatagtttggataataaccaaattgaaaaaacatacccttcaaagccgaaactcaatgtagatgtttcagaagacatttcctccagagagtcagcaataaagtcaacttctacaaaaaatacaggagtagatgtaggtctccaatcagattctaagccagagactacccttaacgataaacaggactctactgacctaaaagtgaaagtgtctgcgaaaatttcatctatcataaactataatgagggtcaatggtcaccaaacaatccaagcggaaaaaaacaatacgaccgagaacagttattacagttacgcgaggttaaggcctcacgtatacaaccagaggtaaaaaatgtgtctattcttcctcaaccaaacttaatgccatcatttattcgaaataacaataataacaagcgagtacaatcgatggttggtattattggcaatcgtagcaatgaatcggcgggaaattatattggtaaacagatgtcgatgtctggcgtacaaagtggcggcggtagaagcagtatgaagggcatgatacacgtaaatttatcattaaatcaagatgtaaagttaagtgaaaatgaaaatgcatggcgccctcgggtcttaaataaatctgatggtgatagcgacgcgaaatctgcactcgaaaaagatgaattggtacgtcgtgttcggggtattttaaataagcttaccccagaaaggtttgacacacttgttgaggagattataaaattgaaaattgatacacccgacaaagtggacgaagtaattgtgttggtatttgaaaaggccattgatgagccaaacttttctgtgtcttacgccagactatgtcaacgacttgctgcggaagtgaaggtaatagacgagcgcatggaaagcgaaaccaaatctaactcggcacactttcgaaatgcattgttagataaaactgaacaggaattcacccaaaacgtttcacaaagcaccgcaaaggaaaaaaaattacagccaattgtggataaaattaagaaatgtactgatgccaatgaaaaagcggaacttgaggcatttttggaagaagaagaaagaaaaataagaagacgatccggagggacagtacgatttattggcgaactttttaagatatctatgttgactggcaaaataatatactcttgcatcgatacacttcttaaccctcattctgaagacatgcttgagtgtttgtgcaagctgcttacaactgtgggtgctaaatttgaaaagaccccagtaaattccaaagaccctagtcggtgttattcgttggaaaaatcgatcaccaggatgcaggccatcgcatcgaaaactgacaaagatggagccagagtaagctcaagagtacgatttatgcttcaagacgttatcgacttgcgtaagaataaatggcaaacttcgcggaatgaagcacccaaaactatgggacaaattgaaaaagaggcaaagaatgagcagctttctgcacaatattttggtacactttccagtactacacccggaggatcgcagggcggctctggtaaacgagatgaccgtggaaactctcgatacggtgaatctcgttcaagtagcgcgtatggtggcagccacagtcaacgtggtgataatggcaaccttcgacaccagcagcagaacaacgtcgggggaaacgtctctggaggtgctggacactccaatggaaacaatgatgaaaatacttggcatgtgcaaaccagcaaaggtagccgctctctagcggttgacagcaataaactggaaggcctgtctaaactttctgaccaaaatctggaaacaaagaagatgggtggattaacgcaattcatttggattagtagtgacacgacaagactatcgtcggcgccgacaccaaccccatccaatcctttcgctgtgctctcatccctaattgataaaaatagtaatgaaagggatcgcgatcgcagtggacccagaaacaaaggatcatacaacaaaggttctatggagcgggatcgttatgatagaggtatgcattcgagaactggatcatctcagggatcacgagaaaactcatcctcccgcggtggtcagcagggtcgaactttattgagttcatcagttcaaaaatctactagtcattcaaaatacacccaacaggcaccacctacacggcatactgttaaagcccagtcatcagtgggcagctctaacgttaacacaggtccactctaccgtggaagtgagcagcaaacatcagcaaccttctcgcagaccacccgttctgttgctcctgtagcagtgttcatcgaagctagcgaaacagatttaaaactcatcaaatctgttgtttcagaaattgtagacctatcagctgcatctaaagaagtcacgcccggtgcagtttcgtgcataaaacgagtaccagagaaactacggtgcagtttcatttattatattttaacagattatttgcatttagcaaatgtaggtaaacagtacaggcggtatttatctattgccgtctcccaacttattcagcagaattacatttctgccgatcatttgagactggcttacaacgaatttaccgtatatgcaaacgatttgattgttgatattccggagctttggctatacattcttcaatttgccgggccactaattgtaaagaaaatattgactatatcagatttgtggaacaacaatttaaaagaaaatagtccatcaaacgtcgctaaaaagttccttaaaacatacttgatatattgcacacaagaagttggaccaaattttgctcggaatatgtggatcaagtttaacctaaaatggtcagattttatgcctgaaagtgaagttgccgactttattaaatttaacagactggaatatgtggaaaacgaatcaaagtcgccagtgattgatcatagagagactccagaaaagcacgttaaaaatgtgatagaccatattgagcacttactaaaggaaggaacaacggcggactgcattattgattatagtaacggaaatataatggtggttgataagttgtttatcagaggattgacggaaacattgagtaatttctcgattcactacaaggacaacagttacaagcttgagtccgaaacctttcaaaagttttgcataccggttttgcagagatacattgattctaatgaagaccaccaacttgaatgtttatatactttgcagcttttagttcatggattggagcatccaagagggttgctgagtgaactaattggcgagctatatgatgcctttgtaatacagaaggaatcgctttgtaagtggcgagattcaaaggatcagtctgctggcaagggcgttgctgtaaaaagtcttaatcctttttttaactcgttgttaaacgatgatgccaactaaaagtgacctaaacagcataacttttaaaatttgtaaaaaaaaaattaaatacagagttggagggtgaagaaagttcattaaaagtatatacgatttcgatatggacttatttaataacgctatgcttctggttcatgcattaaaagtatatgcaacaatataaaagtgtataacatatgtaaaataaagcgaacct

SEQ ID NO: 42954 - protein, 1666 aa, DROSOPHILA
MQQAIPTLPTQSDIDKAMQPHSAQNMYVSTGNNNSGNTRSNPQSGGIFRGPPSTPNAPRGASGGATRHVHVQPMYSQPLHQNMVLQQYTQYNPRQQTFPASHLQYAPAPMPYYQYQYVPTLQQQPPHTRSAVTVNTNVNVGNNLQPVQSGPNGPLPVPGASSSQIQLLTSTVQPGASTVMGVGGPGSTMGQVGVPPMVGVGVMTTSVQPQPVQVQPASRRRHQHRLQIIDPTTKKNILDDFDKTKSNTDNEFSDQVTSTNTPATVLSEGPIRIPQQESVGLNNLTSTSSQGSESRTNAPYIPIETTPISRTDVGPTPIVSAMTDAPSVEILPTPQRGRSKKIPIVSPKNVSESIVAPITDETDDAGSTPISRATEESMPPNQTHPNLLISDSSKHKQAVSNSEISKDAPTGLKEMHVAELESSVASENHPAGILDVNVNKSSQSLDFSADPEIDSIGAISPTSPNAVSPILHEVLDNTELSKKLENSTTERFKDSQSVEKPTHQELSLRNATDETEISAMALQDVNSLDNNQIEKTYPSKPKLNVDVSEDISSRESAIKSTSTKNTGVDVGLQSDSKPETTLNDKQDSTDLKVKVSAKISSIINYNEGQWSPNNPSGKKQYDREQLLQLREVKASRIQPEVKNVSILPQPNLMPSFIRNNNNNKRVQSMVGIIGNRSNESAGNYIGKQMSMSGVQSGGGRSSMKGMIHVNLSLNQDVKLSENENAWRPRVLNKSDGDSDAKSALEKDELVRRVRGILNKLTPERFDTLVEEIIKLKIDTPDKVDEVIVLVFEKAIDEPNFSVSYARLCQRLAAEVKVIDERMESETKSNSAHFRNALLDKTEQEFTQNVSQSTAKEKKLQPIVDKIKKCTDANEKAELEAFLEEEERKIRRRSGGTVRFIGELFKISMLTGKIIYSCIDTLLNPHSEDMLECLCKLLTTVGAKFEKTPVNSKDPSRCYSLEKSITRMQAIASKTDKDGARVSSRVRFMLQDVIDLRKNKWQTSRNEAPKTMGQIEKEAKNEQLSAQYFGTLSSTTPGGSQGGSGKRDDRGNSRYGESRSSSAYGGSHSQRGDNGNLRHQQQNNVGGNVSGGAGHSNGNNDENTWHVQTSKGSRSLAVDSNKLEGLSKLSDQNLETKKMGGLTQFIWISSDTTRLSSAPTPTPSNPFAVLSSLIDKNSNERDRDRSGPRNKGSYNKGSMERDRYDRGMHSRTGSSQGSRENSSSRGGQQGRTLLSSSVQKSTSHSKYTQQAPPTRHTVKAQSSVGSSNVNTGPLYRGSEQQTSATFSQTTRSVAPVAVFIEASETDLKLIKSVVSEIVDLSAASKEVTPGAVSCIKRVPEKLRCSFIYYILTDYLHLANVGKQYRRYLSIAVSQLIQQNYISADHLRLAYNEFTVYANDLIVDIPELWLYILQFAGPLIVKKILTISDLWNNNLKENSPSNVAKKFLKTYLIYCTQEVGPNFARNMWIKFNLKWSDFMPESEVADFIKFNRLEYVENESKSPVIDHRETPEKHVKNVIDHIEHLLKEGTTADCIIDYSNGNIMVVDKLFIRGLTETLSNFSIHYKDNSYKLESETFQKFCIPVLQRYIDSNEDHQLECLYTLQLLVHGLEHPRGLLSELIGELYDAFVIQKESLCKWRDSKDQSAGKGVAVKSLNPFFNSLLNDDAN

SEQ ID NO: 42955 - DNA, 2474 bp, DROSOPHILA
agtgggttcgcatcggtgtggaggagctagcgaaggactcacggcccgttgaagtggccgtctgacgggcgaaatgaatacgtagccatttcggtggcaggacgatggaataaccaaagaaacaagcaaaattgtattatgtattgtattaggagcgactcaggacaaacaagaaacaagaaactagaaatagagagaaaaaacagggtgtcggctattgctataccctggaaaacataattggtataaaatcactggcacatatttaaaagttgatgtttgatttgaagtaggtttgaacaaatttcatattcgtttgtactttttttctccgggctatgggctttgttcctaggtcaacctaatggcatggaaactaagcttattagataccaataatacccatttacagggtacaaaagggacaaaattgatgggcactgcaataaggacaactgcgataagccccgacgataatttggccagcctgctcatcctggttccattctatttttacagggtctgtgcgttgccattttgttctgcttttgcaacggcgaggtgattgcccaaatgaagcgcaagtggcggatgatgtgcttcagcaaccgaccgcggaccaattcctatacagccactcaggtctcggtaagatttgtactaaaagcttcacatgcttttctcccatcctttctactttctactaattttgtaccacgggttacggcgcgtatgagtaatgcagcagcagtagcacacttaagcactcacagtttattggcctatagatccgaattaatcgcatgcaacaaataataatacaaaaaccaaatgaattagaacagtataaacaaaaagagacataagacagttatacagaaaccgacgcaccgttgccaactggccaaccaccatgatagcaaattctcagttcttttgattgtagttcgtgcgctgcggaccgccactgccaggagaggagaaggtatgactaaaggacatgtcggccaagcgacgcgcctcagcaggaccccaacaccaccagccccatcaccaaagccaccagttgtccacggatcagcagagagctcgcagccagagcctggcgagttcgtcgtccttcctggaaggctggcgcgaccggatgccgttcctgaaacggcgacaaactatcgaccactcccgccagagccagccactcatggaggagggcggagagaccgttggccaggccaaatccgcgccaggtgccgttgacaggccgacattgatgacgaccattgcggaagatgttgccgagacaggaacggcagcaacatcgcacgcagcttcaacatccgacgcagcagcagcagcagcagtaggagcaggaggtgcaactggagcggaggagggccatcccaatggcatgggcactgtcatcgttcgcatggagagagctggccaacagcatatggccgatgaggcgctttaggttaaacccttcgagtcacacaacatctcatagtttaagccacagttataccaaaaccgaaacaggtcaagaacccaaaaatcaaaccccaccaaaagctacagcccattgaacccagttagtatcgccaggcatgttcctgaaatagagtttctaaaataaataaacgggtgcccaaaagtggtcaatgtcattgttgttaaatgttcagaggcactgccgataaagaagcccagctaaaatcttaaaagtaacattttcattagctaaatttgcatttttcctaaatttgccatgcatattttatagtctatttggtagacacccgagatattgttacgaaactttcggaaaacttcaaagcacccagaataagttccttagccagctaggctgatgtacaatatattttgcaacaatttgcgccatgctaaatgttaagttttaatagtatatacagaagcagttttccttggtttcctcagaatgcgaaatgcgaaataaatttcagccttttgccggcaacggacccacttgaatgagaacatatttattgtacctatgaatgtaagaatttatgtggatattaaatatcattgttgtcttaagtgttaagtgtatcctaggactagtgccccgaacaccctcctccccaaaaaatatatatatatctctatctctctctgtggtaagctgagctttctggcaatcgcttttagtgtgtctatgaatgtacgcaaatgtaataaaattttaattatatctacgtatgctatatacacttgcaagttcctctggatctgctctgctctgctaattagtcaactttcagtttgtttaatgaatccggggtacgtctgtcaacaacagcaacaaccgcattccagtccggacctaatgcccatttaatgaatgccatttgaagttggccctcctccgtttcgtccccatggacgttggccaggttatccaagcctggtgatgaaagcacaacaggtgc

SEQ ID NO: 42956 - DNA, 474 bp, DROSOPHILA
atgtcggccaagcgacgcgcctcagcaggaccccaacaccaccagccccatcaccaaagccaccagttgtccacggatcagcagagagctcgcagccagagcctggcgagttcgtcgtccttcctggaaggctggcgcgaccggatgccgttcctgaaacggcgacaaactatcgaccactcccgccagagccagccactcatggaggagggcggagagaccgttggccaggccaaatccgcgccaggtgccgttgacaggccgacattgatgacgaccattgcggaagatgttgccgagacaggaacggcagcaacatcgcacgcagcttcaacatccgacgcagcagcagcagcagcagtaggagcaggaggtgcaactggagcggaggagggccatcccaatggcatgggcactgtcatcgttcgcatggagagagctggccaacagcatatggccgatgaggcgctttag

SEQ ID NO: 42957 - protein, 157 aa, DROSOPHILA
MSAKRRASAGPQHHQPHHQSHQLSTDQQRARSQSLASSSSFLEGWRDRMPFLKRRQTIDHSRQSQPLMEEGGETVGQAKSAPGAVDRPTLMTTIAEDVAETGTAATSHAASTSDAAAAAAVGAGGATGAEEGHPNGMGTVIVRMERAGQQHMADEAL

SEQ ID NO: 42958 - DNA, 2689 bp, DROSOPHILA
gccgtttgctggaagctatcccgcacaccgggcgtatgggttttggtcagttccaggccgtgtccatgactgctcatgaaaaataagattagtttcgctattgctcagatcgtaatcctttaagagactcacttgttgtagcccagggtggcgccgctggttacgggagtggataccggtttggtctgcgtgttgcccgctgcgaacacttgtccaataacatggtgatcgggagttccaacggccttgcttaggtccaatcgggcatcggcaccgccactcggattggatgtgagtgatccacccaacacctggcgacgtgccctgtagattctgggtggcgtcggtggtggagatcagtggctgggtatacggacgttggggcaaggccaccgcaagggagccaagtacgccaacgatgaccacaattaggagaacaattttgctcatcttgctgtattaatctcttgattttcgatctacttgactaagcggctgactgttgactgacgatgctgggatctggtcaccgtgaattatatagcaatctatctctgagtggggcttcccatcgaaaccgacaatgaataccaatttatagatggaagatttgtgatgccttatctgtaagctgagcaatgtttcgcactgggatccccgaatgaccaggtggttcacaccgtctgataagagattgtgcatccccttgaaactacttgccggtgatttgcaaactctttaagggtttattttgaagacaattttaattaaatatatttatgaatttatatataataaaacaagaattttaaaataaaatcaatttgaattcaatttataataacatatttgccaatgagtaagttcaaattttaatagagttagcttttaaattttttatgacatttcatgacatttaagactgtttaaaaatctagttaattggtattctttgtatacacaattcagaggataagggatcaaattcgattagtacgcgatgcaagtgcccctgctccaccggagcacccagatggtgctgctgaagaagcagatccggcggaaggcgaaggagttgcgtctgcgaaagcgtcacgcccaccgccgccttcaggtgatgagaaggatccgtgaccatctgctcgacaggatgaggaactccatagatcaccggcagcgggatgcggagcagaagaagagggagcagacacggagggcggtgggcggtatgctttccatgtacaagcattggctgcgcagctggtcaaaagctttaaggttacaaagtcagctaattcggcaccaggagcatgtaaaagtgggaatgcgtcgcaaacttcgacacttgaggaggcagttgaagaaagtccgcaatccaaagaacttggtcgacaagtgcttccatcgactgttcaaggcagttaggaagtggcaaaagaaaccggattactacgaacacgtcaaggatcaggacaagatctgggaggcagaggcactggaggttcgaaactatttatcggaggttcggggaaggcgaccacgaaagctaagccgtggcagggttaaaaaggatttcgaaatcgaggactttgctaaattttggaaaactgaagtgttgcaaacaaacgctatgatcaataaacaaagggccatgagaggaagaaacgtgccagtagatacagcacatgataaaactaggaaatcaaagaagaaattgtggaaaagaaaaaaattatatatcagcttagatgaacttgttattcggaaaaaattgaaaagaattcggaaggacattcgaaagccaaagaaacatgatccattaaaaccatctttagaggaactgaaaatgttgataagggaactaatcagcttcaactggaaaaagatagttattaaaaacccgaaaattaacagaaaagccataagaaaccccaaatttgattttgacaaaatctccgatattacaactttaaacccaaaagtacgaataaaaagaattgtgaaaagcggacgagctcccagaaatgttccagatccgaaaatcattaaattcaaggtaacaagacctaaacttcgaaagcgtaaaatgcactatgtggatagggtaattaaagacgaattaaatgcacttttagagacaaaggcaaagaaaaggggcaatcgtcatggaaaaactaaagaagctgaaacttttcaacaggaaaaggaaaaaagagacttggaaaagcaagaaaatgtactcgaaagattatataatgatatacccctatatatgaggcgtgatattgagagaagaaataggaaaaaactacgtgacaaacttcaagcttctagttcgagtagttcgattgcgtccaaagaggttttcatcggatccgaaaaagtggccactaagtcggataagcacaaaaagctttccagtacgagcagcgtttacgtaatcaaagaccgacccgaattatctgccgagaggagtggttctcatgtgttattcaaaagggatagcgttgcgtccctcactgaatcactgaataaattagttatgggcaatcgaaaccgaaaatttacccgtaaatctattcgcatgccacccatcatacccaagaagatccgcgttgctcctccaagaggtcaagaggaaagtcactatcagtctttgaagaaggatatcatgtaccttcctacaaac

SEQ ID NO: 42959 - DNA, 603 bp, DROSOPHILA
atgcaagtgcccctgctccaccggagcacccagatggtgctgctgaagaagcagatccggcggaaggcgaaggagttgcgtctgcgaaagcgtcacgcccaccgccgccttcaggtgatgagaaggatccgtgaccatctgctcgacaggatgaggaactccatagatcaccggcagcgggatgcggagcagaagaagagggagcagacacggagggcggtgggcggtatgctttccatgtacaagcattggctgcgcagctggtcaaaagctttaaggttacaaagtcagctaattcggcaccaggagcatgtaaaagtgggaatgcgtcgcaaacttcgacacttgaggaggcagttgaagaaagtccgcaatccaaagaacttggtcgacaagtgcttccatcgactgttcaaggcagttaggaagtggcaaaagaaaccggattactacgaacacgtcaaggatcaggacaagatctgggaggcagaggcactggaggttcgaaactatttatcggaggttcggggaaggcgaccacgaaagctaagccgtggcaggggccatgagaggaagaaacgtgccagtagatacagcacatga

SEQ ID NO: 42960 - protein, 200 aa, DROSOPHILA
MQVPLLHRSTQMVLLKKQIRRKAKELRLRKRHAHRRLQVMRRIRDHLLDRMRNSIDHRQRDAEQKKREQTRRAVGGMLSMYKHWLRSWSKALRLQSQLIRHQEHVKVGMRRKLRHLRRQLKKVRNPKNLVDKCFHRLFKAVRKWQKKPDYYEHVKDQDKIWEAEALEVRNYLSEVRGRRPRKLSRGRGHERKKRASRYST

SEQ ID NO: 42961 - DNA, 3782 bp, DROSOPHILA
ggactttgctaaattttggaaaactgaagtgttgcaaacaaacgctatgatcaataaacaaagggccatgagaggaagaaacgtgccagtagatacagcacatgataaaactaggaaatcaaagaagaaattgtggaaaagaaaaaaattatatatcagcttagatgaacttgttattcggaaaaaattgaaaagaattcggaaggacattcgaaagccaaagaaacatgatccattaaaaccatctttagaggaactgaaaatgttgataagggaactaatcagcttcaactggaaaaagatagttattaaaaacccgaaaattaacagaaaagccataagaaaccccaaatttgattttgacaaaatctccgatattacaactttaaacccaaaagtacgaataaaaagaattgtgaaaagcggacgagctcccagaaatgttccagatccgaaaatcattaaattcaaggtaacaagacctaaacttcgaaagcgtaaaatgcactatgtggatagggtaattaaagacgaattaaatgcacttttagagacaaaggcaaagaaaaggggcaatcgtcatggaaaaactaaagaagctgaaacttttcaacaggaaaaggaaaaaagagacttggaaaagcaagaaaatgtactcgaaagattatataatgatatacccctatatatgaggcgtgatattgagagaagaaataggaaaaaactacgtgacaaacttcaagcttctagttcgagtagttcgattgcgtccaaagaggttttcatcggatccgaaaaagtggccactaagtcggataagcacaaaaagctttccagtacgagcagcgtttacgtaatcaaagaccgacccgaattatctgccgagaggagtggttctcatgtgttattcaaaagggatagcgttgcgtccctcactgaatcactgaataaattagttatgggcaatcgaaaccgaaaatttacccgtaaatctattcgcatgccacccatcatacccaagaagatccgcgttgctcctccaagaggtcaagaggaaagtcactatcagtctttgaagaaggatatcatgtaccttcctacaaacagcgagcatatgggtgtatctaggattacagccagcgaatcagctctgcacagagggaaccaatcgaacaggcatcttccacgaagggcttccgatacccaagttggtatttatccgactaaatcccaaagccaagtttttggtcatctatcttcgaaatcgacatccaaaaataaatttaaatatgatgcgctgccagatgatcttgaaaaactccttgcaccggtgcgagatcgccacgacaaaacagaaaatgccccaaagccctacgtcaaagagttcgaattcgaacggtttcatttgaaagatctacgctcagatgccaaattcaaacacttgcagttcctccttaaggacgtcatacaaagaaacgaagttatcgagtatattgccgatgttaatggacttatgcaggaagtagctaaccatgaaatgtggtcccatcttcagagtctctacaacgaactcacagatgcaggagttacgttaacgcaaattaaggaaagtctggccaaaaagtacttggagtatcttaacgaaatagtgaccgagaagaactatgcacgaatggaaccgccgcgggacaatatgcttaacgttttggaaaccgaatctatgaaagccaaacagaagaaagaggtggaaaagtttatggagcgaaactggtggtctaggaagcgggtcagcacacggctcattcccttcggcatgcggggaataaggacgagcaaaattgacccatctcacagctcacgccagtcgcaggaaatcaagatgaacggcggaatgtacaataaactcctcgagcaggagctcaatgcagaacgattggagcgcgaggagcgtaagagaagacgctttagcagcacctttggatcaactataagcttcaacaacagcttggatctggcggccaacgaggagcaggatgtgcgggacatcgagtggcgctactcgctacacaacattaggagcatgatgaaccagcaccagctgatgtttcaggtgggttaactatactcaaccgccaaaaagttataaaataacatcttcgaaatacatttttattctttctttcaggctttggatcgcaaatcgcgagtggagcagttggtccacaagaagatgaagggaaaagtcgaagaattgtatacctctgcacaatttaggcgtcctaaattccgttccaccacttttacggcaaggaagaggagcaaagatcttaggcccatcgaggaactttactactcaccccgaaaaacttgtcgcctgcagaagatctcctgttccgcagagtgtttggcatgcgaaggccaagttgagaaaattggtgattcgatgatcctggacaagtgtcctcggtgtggagtaaaggtgcctgtgcccgcgcccactaccccgttctccatgtcgtcctcgtccagctgcgagatcttgtccagcggatccatagaagcctgtgccaagaacaagctgctaatcaacacgctcgaggacctttgcacacgctgtggctatgtccataaaaaggggcatctttgctcacagttacccatgaatgagcggaagaccaagcttctaaagcggattaagggcaccgtacctactgctcccgagtgcccggcattttgctgcccacgcgggatccttaagaataccagaagttttgatccttagcaggggcgacaaggagtgctgagtacttttgaagccaccaaagtggtaactaaactccggatatgcacggatatgagcaccaccaaatcagccggctgaggcgaatgaaacatttggtttaagtgctaaataaattcaagtaatgagtttgcctctgtctgtgggtgtgcctgtgttgttaaatgctttgccaagtttcataaaatatgcaaggacttttgcacacacacacacacacacattgcacaccaacaaacagggccaagctcatgcgatgcactcacgtagagagaaaatgtctgcgggcttttaatacacttgcaggatgctccttctcctggtcgtgttccttatccccttgctgctccacccactgctccccccgatgctcctgccacgacttctcgctcatgcaacgaaatttcatcttgcctcctttttttttcggccaagtttttaagtcgagccattgctgtaatggaattttattgcatactcgcactcgcattctgtttgcgcaagcgaaacatgtttcagacattttcataaatgaaaacgcttaactacacagccgccgattggccgaagatcaggcaggctctcaaggaattttccgagtaacagatcctatatttcaaaattgttgcaattaaaatggaactgtgcttacaatgttattggttcttcagtaaggatattctcatttaatttaggacattttatgtatttttataccagatcagtggatattacttactgatttataaagcttgtaagactgcatttggaaatcctaatatttgttaatctagttcttgctcttacaaatctgcttatttttcttttttcattttatatataacttgtgaccgaataaattccttcgagtaacttaacccatgtggagacatcgctttaagccataattaaagcacttggtgaccggcaatcgaccgactgtcgaacgcaaggcaataacatttctgcgaaattgatgccc

SEQ ID NO: 42962 - DNA, 1521 bp, DROSOPHILA
atgccacccatcatacccaagaagatccgcgttgctcctccaagaggtcaagaggaaagtcactatcagtctttgaagaaggatatcatgtaccttcctacaaacagcgagcatatggatgatcttgaaaaactccttgcaccggtgcgagatcgccacgacaaaacagaaaatgccccaaagccctacgtcaaagagttcgaattcgaacggtttcatttgaaagatctacgctcagatgccaaattcaaacacttgcagttcctccttaaggacgtcatacaaagaaacgaagttatcgagtatattgccgatgttaatggacttatgcaggaagtagctaaccatgaaatgtggtcccatcttcagagtctctacaacgaactcacagatgcaggagttacgttaacgcaaattaaggaaagtctggccaaaaagtacttggagtatcttaacgaaatagtgaccgagaagaactatgcacgaatggaaccgccgcgggacaatatgcttaacgttttggaaaccgaatctatgaaagccaaacagaagaaagaggtggaaaagtttatggagcgaaactggtggtctaggaagcgggtcagcacacggctcattcccttcggcatgcggggaataaggacgagcaaaattgacccatctcacagctcacgccagtcgcaggaaatcaagatgaacggcggaatgtacaataaactcctcgagcaggagctcaatgcagaacgattggagcgcgaggagcgtaagagaagacgctttagcagcacctttggatcaactataagcttcaacaacagcttggatctggcggccaacgaggagcaggatgtgcgggacatcgagtggcgctactcgctacacaacattaggagcatgatgaaccagcaccagctgatgtttcaggctttggatcgcaaatcgcgagtggagcagttggtccacaagaagatgaagggaaaagtcgaagaattgtatacctctgcacaatttaggcgtcctaaattccgttccaccacttttacggcaaggaagaggagcaaagatcttaggcccatcgaggaactttactactcaccccgaaaaacttgtcgcctgcagaagatctcctgttccgcagagtgtttggcatgcgaaggccaagttgagaaaattggtgattcgatgatcctggacaagtgtcctcggtgtggagtaaaggtgcctgtgcccgcgcccactaccccgttctccatgtcgtcctcgtccagctgcgagatcttgtccagcggatccatagaagcctgtgccaagaacaagctgctaatcaacacgctcgaggacctttgcacacgctgtggctatgtccataaaaaggggcatctttgctcacagttacccatgaatgagcggaagaccaagcttctaaagcggattaagggcaccgtacctactgctcccgagtgcccggcattttgctgcccacgcgggatccttaagaataccagaagttttgatccttag

SEQ ID NO: 42963 - protein, 506 aa, DROSOPHILA
MPPIIPKKIRVAPPRGQEESHYQSLKKDIMYLPTNSEHMDDLEKLLAPVRDRHDKTENAPKPYVKEFEFERFHLKDLRSDAKFKHLQFLLKDVIQRNEVIEYIADVNGLMQEVANHEMWSHLQSLYNELTDAGVTLTQIKESLAKKYLEYLNEIVTEKNYARMEPPRDNMLNVLETESMKAKQKKEVEKFMERNWWSRKRVSTRLIPFGMRGIRTSKIDPSHSSRQSQEIKMNGGMYNKLLEQELNAERLEREERKRRRFSSTFGSTISFNNSLDLAANEEQDVRDIEWRYSLHNIRSMMNQHQLMFQALDRKSRVEQLVHKKMKGKVEELYTSAQFRRPKFRSTTFTARKRSKDLRPIEELYYSPRKTCRLQKISCSAECLACEGQVEKIGDSMILDKCPRCGVKVPVPAPTTPFSMSSSSSCEILSSGSIEACAKNKLLINTLEDLCTRCGYVHKKGHLCSQLPMNERKTKLLKRIKGTVPTAPECPAFCCPRGILKNTRSFDP

SEQ ID NO: 42964 - DNA, 3534 bp, DROSOPHILA
gcgaatgcgaatgcgaaagtgataattaaaaatcgcgccatatatactggttaccagatatgcttgttgccggccgattctctgctcgttgttgttttccccggcatgaaatggttattgtttatgattttccaacgctgtcgagcaggatgttcgcattgcaatcaccactggtttgagtgaaacaatcgatgtgggtgtggcatgtgagcatgtgaatgaagtgatcaatgcgcctaacaatgattgacgccacttcccgcgaccaggggcgtcgccgtggcatggggggaggcgccatgaaagggctgtcgaagatggcgcgcttttccacagccacgcccctttccagctcgactgcagctggcaaacaattatgcaaaatcgctggcgttagcagttttatgcagaaattaattttgcatttttaattttacagctccagtggcgggcgggggctttaagcaaggggagcccagctaaaaacaagaaaaaaaaaaacgctgcgacagcaatctgcactgctcacaaaggattgataagggttagacttggatggtcgaacacttaaagaaaaaaaaagcgagtttctagatatctatatttatgcaataagttacaaatatcaaagtattcacataaattagtatgtatttaggaaaatatattctaaacagtatgtctacatacaatatatctaaagtatatcatctaagggataacatatataatagtataataaattggatcaggtgataatatgatattcgaacatattacgcaaggcttcttgtcatttctcagctaattcttaaatatcaaacagcaaatataagcaaacagcttaaaaacttagaaaaatatagtacgtacttcctttttttaagtgtagctatgtaaacatcacgcgttatttaatctggtccatcaatttggccacgtacccctgagcgtgggcttcttgctcaccgccctaatcaggcacatcattccgcaatcggaagacatagtggtaggttgctcaagatgttccaagcggaccgccgagatttgcccagccaaccgcttaagttggctctgccaaaggagcaggatcagtcgcgcctggttcaggttcccgatcctgatcgtcgggacatgcagtttccagacatttggctgcgcgataattgccgctgcgaggagtgctatctgccacagacactgagtagattgccccagctgtggaaccatctggacaccagtgtgcgggtcctgcggcagagcgtggacgtggaccagagggtcctgtgtatagagtggtccgatggacatacctcccagtatccgttcagttggctgagggagcgggacttctcatacgcgaatcgccagcgttacctgcgtgacttttaccgcccggagcagaagttgtggagcggtctggactttgagaaaatccgtcaggtgttctactaccaagaactgctcgattgcgattcggcgttgcagcaatggctccagcatctggcagtttacggagtggccatggtcaaggaagcccctctcgatatggacgtccttcggagattgtccaaccgagtgggcttcatgaggcgcaccacctatggagaggagttcagtgttcgggctcagcctggaggcagcaactacgcctacttggccgcaccactcccgctacacacggatatgccctactttgagtacctgcccggagtgaccatgttgcacaccttggagcagtccgcgtcgcccgggggtgtcaatctgctggccgatgccttctatgtggcggaggtgatgagggaacgctatccggagcagttccgggttctttgccagactcccgtggactgggcggacatcggaagcgacggcgatctgcagtttcacaatatctggagggcaccggtcatcaagtgagtagatttagattgggagtccagtaaaggagatttatattgatggagttcctttgattgcttagggcgacttaagaatacatttaggtgcagtcagactataaaaatgcttattttgagttcatatttttcaagcaaattctgcacttttaaaatctatttttctcgcaacttgaaatgtttcagttatcttgaaaaatatttcagatatttttaggtggaggtaacaatttgttgacgaggggaaatgcatagttgccccagcagaacttggctaacatttcgatctcttgcagcttggacgcggagggccggtgtgtgcgcatcaaccacagcattccgcagcgcgacagccactttagcgtgccggtggagcaggtgcgtccgtggtacgaggcgatggccacctttgtgggcctggcccacgagcactcctgcagattcaagaccacgcccggcgacgtgctcacgttcgacaatttgcgcctggtccacggacgtaccgggtacgacgacacggaccgcaatgtgcgccacattctgggcgccttcgttgactgggacattgtgtactcgcgcctgagggtcctgcggaatgccaaagccacctgatgctccttagatagcaggagcagcaagcacatgttatgttatggctacattaattagccatctatcaatgccaaaatgctttgattgacatcgcaatgtggtagcaatagacagagtagaatcattagattactttcgaatttattgtgctcgagaaattaaaccatttattgacattttgaataaatactattttaatggtttctaatcctttgacacgcttcaatgctaattgacattatttaattgggttaaacgtgtgatttaaggcattttgaagaggaagaagaagtcactcgagaagtttactaatctgttaaacgtgaacatctctggctgataagtaattctattagtttcgctaccctgtaagaaagtgacataggaatattagactatacgctgatattcaaaactataaaatgtattattcattcgtaaatatataggtagaattttggagactactataagtattcaattcaacaaaaattggaaaatattaatttaatttaaaatggtaagagtataaattgcttcatgagcaatattagataacctaacctaaattacagggtatgcaggcaaatccgtgattcaacaactgctagccaaacaggccactggaagtgaaagtccagcacacgtcattgtttacgccgggcaacaaagtggcttatcagtggccagttgagtcaaatttcaaccagtatgtccatatatatgtatatgtacaataggtatatatttctattatcaatttatggcaatgcccagatcaacaccgacttggcagagctcttagctcttggcatgcgagtaaatcacacccacacaccttcatgattttcattggactgggaaaacttggctggaatgtcggggtgttttcccttcgcttttcttttcgggtgtttgggtgcggtgtcccgcaggcaaatcctttggaaatctttttatttatgtcattgatgccaccaggaccaagtgaggtagcaga

SEQ ID NO: 42965 - DNA, 1235 bp, DROSOPHILA
gaagacatagtggtaggttgctcaagatgttccaagcggaccgccgagatttgcccagccaaccgcttaagttggctctgccaaaggagcaggatcagtcgcgcctggttcaggttcccgatcctgatcgtcgggacatgcagtttccagacatttggctgcgcgataattgccgctgcgaggagtgctatctgccacagacactgagtagattgccccagctgtggaaccatctggacaccagtgtgcgggtcctgcggcagagcgtggacgtggaccagagggtcctgtgtatagagtggtccgatggacatacctcccagtatccgttcagttggctgagggagcgggacttctcatacgcgaatcgccagcgttacctgcgtgacttttaccgcccggagcagaagttgtggagcggtctggactttgagaaaatccgtcaggtgttctactaccaagaactgctcgattgcgattcggcgttgcagcaatggctccagcatctggcagtttacggagtggccatggtcaaggaagcccctctcgatatggacgtccttcggagattgtccaaccgagtgggcttcatgaggcgcaccacctatggagaggagttcagtgttcgggctcagcctggaggcagcaactacgcctacttggccgcaccactcccgctacacacggatatgccctactttgagtacctgcccggagtgaccatgttgcacaccttggagcagtccgcgtcgcccgggggtgtcaatctgctggccgatgccttctatgtggcggaggtgatgagggaacgctatccggagcagttccgggttctttgccagactcccgtggactgggcggacatcggaagcgacggcgatctgcagtttcacaatatctggagggcaccggtcatcaacttggacgcggagggccggtgtgtgcgcatcaaccacagcattccgcagcgcgacagccactttagcgtgccggtggagcaggtgcgtccgtggtacgaggcgatggccacctttgtgggcctggcccacgagcactcctgcagattcaagaccacgcccggcgacgtgctcacgttcgacaatttgcgcctggtccacggacgtaccgggtacgacgacacggaccgcaatgtgcgccacattctgggcgccttcgttgactgggacattgtgtactcgcgcctgagggtcctgcggaatgccaaagccacctga

SEQ ID NO: 42966 - protein, 402 aa, DROSOPHILA
MFQADRRDLPSQPLKLALPKEQDQSRLVQVPDPDRRDMQFPDIWLRDNCRCEECYLPQTLSRLPQLWNHLDTSVRVLRQSVDVDQRVLCIEWSDGHTSQYPFSWLRERDFSYANRQRYLRDFYRPEQKLWSGLDFEKIRQVFYYQELLDCDSALQQWLQHLAVYGVAMVKEAPLDMDVLRRLSNRVGFMRRTTYGEEFSVRAQPGGSNYAYLAAPLPLHTDMPYFEYLPGVTMLHTLEQSASPGGVNLLADAFYVAEVMRERYPEQFRVLCQTPVDWADIGSDGDLQFHNIWRAPVINLDAEGRCVRINHSIPQRDSHFSVPVEQVRPWYEAMATFVGLAHEHSCRFKTTPGDVLTFDNLRLVHGRTGYDDTDRNVRHILGAFVDWDIVYSRLRVLRNAKAT

SEQ ID NO: 42967 - DNA, 4920 bp, DROSOPHILA
atttggcgcattgactccataagagtgcgacattcgtgactctgggaacaaaaagggcatctaaacaaacactagaaatgccagcaaggaccgccctttagcttatttttagtcgcgtggccagaagtggccagaatggccagtttgaagtgggcaggtgtacgggtgtatgggcacctgtcgtcgccaatcaaccttgactagaactgggcgttgcagggtggtagggtcactgggttaggttactaacataagagtcagttctgcacaaggttgccttttgctgctgccacactgaggtaaatattttgaggcaacatcaggtgcgtaaaaatgtcaatagagtctaaaaatcactttgaacggtgtttaaaagtaggaaactatattaacaatatattaacactggattcttttcttaactgctattaagagactttaaaaaattatacaataatttccaaatgtttatatacattttaaaatacttagtttgtaattgctatttttccagtgatttgttactgttagttggctttagatgcggtttgcttggttggttggccagcgattttccaataaaatgaaattgcatttgatgatgccaggatgttttttttttttcaatcattgtgatatttttccctcaccccttttgttttcccatgctgttttccttcacccctgccatttatagaaaattgaatcaaagtgttggtggcattgcgacaaactgctggacgaatgagcgcgtgatttgaggcgatttgtagaaaagtgaaagccggctcctggccaccgggacccaggtcccaggtccttgcgtcctgccagcgaaggaagtgattagtgtagcactgctcgacggcttccttgcgtgagtcgcggcatcctgggagaaacgggaacaaagcaaacacggcgcagcggagaaatccaatttgtaatggccaagctggccaagtagcccttgatttcattgtttcaacgggttaccgctaacacacacacacacaaacagacacccttacaccttttaaggagttttgtaaacattttccacatattgtgctgcaaatcgaaaaataaaaaatccgaaaaaagtttttaccaaaccaagatgcattcgaccaagattaaagagggtgatgacagagtgagttgtccattctattgccagtcatatgtgttggccattaaacgtattcaactaatttgaatgccaccgtttaggaggagatggagctaaatcaaatctggcgaggatgtcgtaaaatccagggcgccatttttcgttataactttgacatctgcgccgacttaaagcagcatgatccctgttgcagtggcttcgtgtccggtgagcacatccttcggatgtatttcccatttttattgcgccccctttttacgacctaacccatctactccagagcccattttcaccgccgtgctgggcaagtatcgcaaggtggccggattgtccgagtcggaactccgggatgtcactgactatttccaaattcgagatggacgcgtagcgtatcgtcagttctgcaaggtcgtctgcagcgaaagtaagttggtttttggttaaattgtatcaatgctatatctatttaacatataattttagcactgcataagaccgccaaaagtgatctagctacgggactggagtggaacgatccctggcatgtgaatgttgtaccccagccggaggatcgacgacgtctctgcctgatcctgctcaagattgcccaactatgcaatattccgctcatgccctactttcaggactacgaactagtaattgatttgcttaatcatatatccaccatattaataagctattacatttatttatagattgcacaaaatgttggagttgttaccgttgcgcacttttctcgtgtgctgcactttatgaagataccactttcggagtccgattttctgctcctcctcagacgctatatgaaggatggttacctggtcaactatgtggctttcctcaagcacatcgataatattatagcatacctgggcgagcatcatctgctggacaactcacatgtaagtgctaacttcaatgctaaagaattcgcgcgtatgatgaaatgtgttccgaatgtaggatattatcaaggactttccgggacgtttagtggacctagaactttcccaactgccagctattgatggttgcaaggcagtgcatccaatctttcccgatgcctgcagtacacccaaaaagaatcgaaatcagtgcgacattctgttctgcattcagaactacatctacaagaaccaagtgcgcacctccgagttcctagagtgctatgacagcctaaacgtgggcagcatcaccaagaatcaatttgagcgcggtctatcgaacatgggagtgggaaaatatctgacccaaagggaaatgtccattctgctggaacgctacactgatcccgtggatatcaatcgagtgcgttggcgcaatttcgctgatgagatcgatacaggtgaagagtaatgaacactatgagcactaaactctctatatatatatatgtattatatttttagtattcaccattaagaacctggagaagatgccacagtgtgtcgtggaatcgccacttcgtcacatccaggagttgcccagacccggcgccgtgccctgggagtctgtgtcggctaatgttcgtgatctgtgtgaggatgccatggccaagattaagatacgcatccgcaatcgtcgcctctatctgcatccattcttccgaagctacgataagtaagtttaccgataccgatcttaaatgaagattgaactatttggcgtttcctttccagactcaacagtggacatgtgcgttgcaacattaccaagcagatttttcgcaccaatggcatccttctgtccgatccggagcaggactctgtgctgagtcggtatggaaacgagctgggcttttgctacaccaagtttttggacgacgtcgatccggcggagtatgccatgccagcgctggtcaccaagcagcaactggtggagtgtccaccgtttgcgagagacaatttggatcccgaggatgtcagcgaggaggtgatcgtgcgcatccttacgaacgccaagcgacaggctgtggtcaagagcgtggccgtcatcgagttcatgaaggactacgatcgccatcgcgagggcgagatccttgaatcggacttcaagcgagccctggataactcaagtgtaatcatcaaggaagaggaagctaacatcttgtgcaacatgtgagtaattcgcaacttgtatatgtattatatttcatttatatccttttaacatgaccagcttccgttcaccgaatcgcgtgtcctgcattcgctatcgcgatttctgcaaggccctcgacgagatcttcatccaactggacacgaacatgggtgaccaggtggtgaccgccgtgccactgctccatttgcccaatctggactgcgtcgactgcttcctgagcttcgacgagcgaaccatctgctcgcaggccctgatgaagttggcccgcaaaccggacgagatctccaatctgagtcagctgttcaaggacttcgatcgcgaacagtgcggctcgatcacgcagaatcaattcctgcgcggcatcacggtgcgcgacatgcatgtaatgctgagcagccgcgagttccaagcgatctgcaagtgcttcggcgtgaagaagggcatgtgcatggagttcaactaccgggagttcctgaaaatcctcgacgtgctctttgccaccggtcaaatgaagcgcaactattagtggcgcgaaaactaaccctctccaaattccaagtgtatcatttgtccaaatttttgaatgttatcagtaaaataaaaaaaacaattggtggattcttttaatttaggtttctttaatgtaatgttcgctttaaaactgatctcctatcattcaattaagttaggttgtaatttcgcttgagaatgtttaatttctttttttttttaagggggaaaatccacgcttccatgtattgatttcctcgaaatgctacctaaactgcccgtccagcacacatcggcatttacatatattaatgccatccattcagcttgacggtcggacgatttcataaagattttcatatagctatagtagtgtatacatagatagatttgatttaacaattcgcattcttgcagtggtctatacaattgtgggtgtgtacgtagagagtgtgactttagatttttattaaaatataaatctcttccctttcagaagtgtacataaatatagatgtattatgtattatgtatgtatatatgtagtctatgagcgtaatacacatatccggaaaacaaaaactaatatcgtttccgctttctctgctctgtactagtatattatgtaatatggtggtttgtttgttgtaggttgtttctgctttgttgtcttgtcctgtgtcttgtcgtatatcgtatatcgaatatcgtatatagtttttctcaatcgaacgggaagaaggcaacccgatgtgccagccagtcaatgcttgcttcttttgtttgttggttctataattattattacatattacagttaattcataattaaagttaaacaaatacttatactctattgtattgtgtaatatatgaaacattttagctgtattttttgttttgttttgtaagtatttttgtttgatttcttctgtttttttttcctatctttcctatctctccgacatcctgtgctctactgacgcgttaaacaattacctcgcataatgtatgggactacattagaaaaacaaattagtttcgacacacagacaacgtgagcattgcacagcagttagtttggcaaatgttgtttgccacgtttccctgcaatg

SEQ ID NO: 42968 - DNA, 2406 bp, DROSOPHILA
aacacacacacacacaaacagacacccttacaccttttaaggagttttgtaaacattttccacatattgtgctgcaaatcgaaaaataaaaaatccgaaaaaagtttttaccaaaccaagatgcattcgaccaagattaaagagggtgatgacagagaggagatggagctaaatcaaatctggcgaggatgtcgtaaaatccagggcgccatttttcgttataactttgacatctgcgccgacttaaagcagcatgatccctgttgcagtggcttcgtgtccgagcccattttcaccgccgtgctgggcaagtatcgcaaggtggccggattgtccgagtcggaactccgggatgtcactgactatttccaaattcgagatggacgcgtagcgtatcgtcagttctgcaaggtcgtctgcagcgaaacactgcataagaccgccaaaagtgatctagctacgggactggagtggaacgatccctggcatgtgaatgttgtaccccagccggaggatcgacgacgtctctgcctgatcctgctcaagattgcccaactatgcaatattccgctcatgccctactttcaggactacgaactaattgcacaaaatgttggagttgttaccgttgcgcacttttctcgtgtgctgcactttatgaagataccactttcggagtccgattttctgctcctcctcagacgctatatgaaggatggttacctggtcaactatgtggctttcctcaagcacatcgataatattatagcatacctgggcgagcatcatctgctggacaactcacatgatattatcaaggactttccgggacgtttagtggacctagaactttcccaactgccagctattgatggttgcaaggcagtgcatccaatctttcccgatgcctgcagtacacccaaaaagaatcgaaatcagtgcgacattctgttctgcattcagaactacatctacaagaaccaagtgcgcacctccgagttcctagagtgctatgacagcctaaacgtgggcagcatcaccaagaatcaatttgagcgcggtctatcgaacatgggagtgggaaaatatctgacccaaagggaaatgtccattctgctggaacgctacactgatcccgtggatatcaatcgagtgcgttggcgcaatttcgctgatgagatcgatacagtattcaccattaagaacctggagaagatgccacagtgtgtcgtggaatcgccacttcgtcacatccaggagttgcccagacccggcgccgtgccctgggagtctgtgtcggctaatgttcgtgatctgtgtgaggatgccatggccaagattaagatacgcatccgcaatcgtcgcctctatctgcatccattcttccgaagctacgataaactcaacagtggacatgtgcgttgcaacattaccaagcagatttttcgcaccaatggcatccttctgtccgatccggagcaggactctgtgctgagtcggtatggaaacgagctgggcttttgctacaccaagtttttggacgacgtcgatccggcggagtatgccatgccagcgctggtcaccaagcagcaactggtggagtgtccaccgtttgcgagagacaatttggatcccgaggatgtcagcgaggaggtgatcgtgcgcatccttacgaacgccaagcgacaggctgtggtcaagagcgtggccgtcatcgagttcatgaaggactacgatcgccatcgcgagggcgagatccttgaatcggacttcaagcgagccctggataactcaagtgtaatcatcaaggaagaggaagctaacatcttgtgcaacatcttccgttcaccgaatcgcgtgtcctgcattcgctatcgcgatttctgcaaggccctcgacgagatcttcatccaactggacacgaacatgggtgaccaggtggtgaccgccgtgccactgctccatttgcccaatctggactgcgtcgactgcttcctgagcttcgacgagcgaaccatctgctcgcaggccctgatgaagttggcccgcaaaccggacgagatctccaatctgagtcagctgttcaaggacttcgatcgcgaacagtgcggctcgatcacgcagaatcaattcctgcgcggcatcacggtgcgcgacatgcatgtaatgctgagcagccgcgagttccaagcgatctgcaagtgcttcggcgtgaagaagggcatgtgcatggagttcaactaccgggagttcctgaaaatcctcgacgtgctctttgccaccggtcaaatgaagcgcaactattagtggcgcgaaaactaaccctctccaaattccaagtgtatcatttgtccaaatttttgaatgttatcagtaaaataaaaaaaacaattggtggattctttt

SEQ ID NO: 42969 - protein, 714 aa, DROSOPHILA
MELNQIWRGCRKIQGAIFRYNFDICADLKQHDPCCSGFVSEPIFTAVLGKYRKVAGLSESELRDVTDYFQIRDGRVAYRQFCKVVCSETLHKTAKSDLATGLEWNDPWHVNVVPQPEDRRRLCLILLKIAQLCNIPLMPYFQDYELIAQNVGVVTVAHFSRVLHFMKIPLSESDFLLLLRRYMKDGYLVNYVAFLKHIDNIIAYLGEHHLLDNSHDIIKDFPGRLVDLELSQLPAIDGCKAVHPIFPDACSTPKKNRNQCDILFCIQNYIYKNQVRTSEFLECYDSLNVGSITKNQFERGLSNMGVGKYLTQREMSILLERYTDPVDINRVRWRNFADEIDTVFTIKNLEKMPQCVVESPLRHIQELPRPGAVPWESVSANVRDLCEDAMAKIKIRIRNRRLYLHPFFRSYDKLNSGHVRCNITKQIFRTNGILLSDPEQDSVLSRYGNELGFCYTKFLDDVDPAEYAMPALVTKQQLVECPPFARDNLDPEDVSEEVIVRILTNAKRQAVVKSVAVIEFMKDYDRHREGEILESDFKRALDNSSVIIKEEEANILCNIFRSPNRVSCIRYRDFCKALDEIFIQLDTNMGDQVVTAVPLLHLPNLDCVDCFLSFDERTICSQALMKLARKPDEISNLSQLFKDFDREQCGSITQNQFLRGITVRDMHVMLSSREFQAICKCFGVKKGMCMEFNYREFLKILDVLFATGQMKRNY

SEQ ID NO: 42970 - DNA, 7582 bp, DROSOPHILA; identical to SEQ ID NO: 27760

SEQ ID NO: 42971 - DNA, 1644 bp, DROSOPHILA
tctgtcactttcacttccgtttgtgtcgagtcgcttgcgttttttcgtgtgggaaagcctgaaaaagagagagtacggcagcgacttaattgtaaatttgccacaaatatccttcactgaacgcacctgctccagatacgtaaggaaccgttatcatggtgggatctcgagtgtatgtgggcggtctgccctacggagtgcgcgagcgcgatttggagcgctttttcaaaggctacggccgcacacgcgacatcctcatcaaaaatggctacggctttgtggaattcgaagactatcgtgatgccgacgatgccgtctatgaactgaatggcaaagagctgcttggcgaacgtgtggttgttgaacccgccaggggtaccgctcgtggcagcaaccgcgaccgctacgacgatcgatatggtggtcggcgggggggcgggggcggtcgttacaacgaaaaaaacaaaaattccagatcatcctctcgttatggcccaccgttgcgcactgagtaccgactgattgtggagaatttgtctagccgcgttagctggcaggatctcaaggattacatgcgccaggctggcgaggtcacctatgccgatgcccacaagcagcgtcgcaatgagggcgtggttgagttcgcctcgttgtcggacatgaagacggccattgagaagttggatgacaccgagctaaacggcaggcggatccacttggtcgaggatcgtcgcggaggacgcagcggtggtggcggcggcagcggacgtggacgctcccgttcgtccagctcccgatcgcgctcccgatcccgcaggcgttctcgctctcgccgctcgtcgcactcgcgctccaagtctcgcagccgctccaaatctcgtggcggacgctccaagtccaagtcgccagtcaagtctcgttctcgctcccgctcgcgatccaacaaatcgcgtgacgtgtccaagtccaagtcaaagtcccactcccgcacccgctcccgttcgcccaaacgtgagcgtgactcccgttcccgatcgcggtccgtctcgaagcgcgagtcccgttcccgctcacgttccaagtccatccaccgcgactcccgttcacgcccgccaacggtggtcgttcaaaagctcgttctatagttcactacaatgcctttcttttgcagcgatcgatccgcatcggctgaaaacaagtcgcgttcgcgctcacgctcccgttcggcctcgcccaaaaatggaaacgcctcaccggaccgcaataacgagagcatggacgattagattagttagctgtcccattaatattaaaacacttgattttagacttctactataactattctacaaacatcaacactcagacaccccgactacaaccaaaacttaatgaatatgaaatcataccaatccaccactgtcgggcctcgtcattttcttttaaatatataacgacaatttgtcctaagtcttgttgtggacatgggacattggctggaagatgacagggatcggctgaatgtgccgatttggattcaaggagtacatataggccacgaaattactgcgacttgtacaccggaacacttaaaattgtctatacaatgagtaatttcaataaatacggataaatttaaactat

SEQ ID NO: 42972 - protein, 329 aa, DROSOPHILA
MVGSRVYVGGLPYGVRERDLERFFKGYGRTRDILIKNGYGFVEFEDYRDADDAVYELNGKELLGERVVVEPARGTARGSNRDRYDDRYGGRRGGGGGRYNEKNKNSRSSSRYGPPLRTEYRLIVENLSSRVSWQDLKDYMRQAGEVTYADAHKQRRNEGVVEFASLSDMKTAIEKLDDTELNGRRIHLVEDRRGGRSGGGGGSGRGRSRSSSSRSRSRSRRRSRSRRSSHSRSKSRSRSKSRGGRSKSKSPVKSRSRSRSRSNKSRDVSKSKSKSHSRTRSRSPKRERDSRSRSRSVSKRESRSRSRSKSIHRDSRSRPPTVVVQKLVL

SEQ ID NO: 42973 - DNA, 2396 bp, DROSOPHILA
gtttgccgtgctgctcgcaactttgacacgaccagttccaaaatatcgtgagatttacgcaaaactactagaaaatggtcggttggagccgtttgctgtcgccggcggcgaagttcgccagctaccgggctgtcctgcaagagcccgcgtgccggaatggtgagcatttcttgaaaatatccgccgtaaacacacttcacattacgcaaccatatattctggatttctagccctgcaccaacagctgcgcagaatgggaggcgatcatggacaccaccaaatgatcatcaagccatcccgcttccagtgggacaagttcaaggatctgttgcacttttacgtaatgctcggcgtcatcccagtcaccgcattggttctctacgcgaacatctttgtgggacccgcgcagctcgccgagattcccgagggctatgagcccaagcactgggagtacgagaaggtatgatgggctcggaaaggcaaccaatcgatactaagattgtaattccgagatatctctttattatctagcaccccatctcgcgctttatttcccgctacattttgaactcggatcagcaaaactacgagaaatccctgcactatctctacgaggagaacgaaaaagcccagattcggtaatgcgacggaaacaacccagttatatcccattgtaaaacaatatatttcctttcagactccttgaggacgaagtacgtcgcaagatgtcggagcgcaatgattaccaggcctactactaccgaccatcggtggccaagtaccacaggatttcgaaagaggctgctgacgagctggaggctctgcgcggagactagaacccttgtaatattctttaaataccattgttaggatcccgttttgtgggaaataaagtgtgaaatcgacttcgcaacatcatcttattcacatttaataatataaaaattacacagtagtcgaataaatacttaagacttagcaaagtcatgtgcgtatcgatttagccccacgcctgattcttgcagtagtagagcaccagtttcccattggttccatggcactcgtacaagttcttgattatctgatccggggcaggtgcaaatgtctgattaacgtacaggaactaaaaattaagatgacacataagatagggttctctggaacttcatttgttacgtgcaatttgctcgctggcatcgagtttcagaaacttgtggatgaacgtctgtatccagccgactgtcttgttgggatctacggtccaggttcgctttttgatgatgggcacattgccagtggcgttcagaaggatacaaactgataatgaagcaagtctttgtgataaaacgaatgcaaaatatataaagttaactttgattctcacttttggaaccatccttatctgcaggtgtggaggaggaagtgctcagcgctgcctgggattctggtgtctctgccatttatttggaatgtaactaaattaaatagttcctaattaatgaattaaaacagccaataatgtaaataaaatataatctgttagagatcagaattttctgaagaaattatcgataggtgtcacgagattagcgattcagctaattatttgagtaaaatatgctgcatatcatctgattttgttttaaggaattatttactcattttcttgtcatattttttatttaaacatatttttatatttgtctatcactttgagactttcaaaattcgttgttaattgttccacctttagcgttaacagcggctatgttattttacattcgactgttattgtaacacgtgtggagtttataaaacaatccagggaaataaacaaaactatgaataataatctttttgagggctccgacgacgatggggaggatctgcagctgtccacgaacaaggactatgccaagacctacaacatcctgcgcaagaaagagctactacagaaatgtaagttcagaatccggtactgcgatcatttgccatttgttaattatattacttaatatttctcagataaggatcgtggcttggatgtttccgaatcggaattcgacagtgacagctcgtcatccgaggaggacgaggtggaccccaaattcgaccaggacttcttcaagaccctgtcctcgctgaaaagtaaagacccatgtatctacgacaagggtacgaaattcttcagtgagtcctccggcgatgaagatgataaggatggggaggctccgaaaaagaagaaaaaagccaagccagtcactttgaaggactacgaacgaaaggtaattttggagcataatggcaagttcgagagttcagatgaggagcagcaggaaaaggagcacgaggaactccaacgtgcgcagtcaccgagcgccgtggaggaggagcgc

SEQ ID NO: 42974 - DNA, 339 bp, DROSOPHILA
atggttccaaaagtgagaatcaaagttaactttatatattttgcattcgttttatcacaaagacttgcttcattatcagtttgtatccttctgaacgccactggcaatgtgcccatcatcaaaaagcgaacctggaccgtagatcccaacaagacagtcggctggatacagacgttcatccacaagtttctgaaactcgatgccagcgagcaaattttcctgtacgttaatcagacatttgcacctgccccggatcagataatcaagaacttgtacgagtgccatggaaccaatgggaaactggtgctctactactgcaagaatcaggcgtggggctaa

SEQ ID NO: 42975 - protein, 112 aa, DROSOPHILA
MVPKVRIKVNFIYFAFVLSQRLASLSVCILLNATGNVPIIKKRTWTVDPNKTVGWIQTFIHKFLKLDASEQIFLYVNQTFAPAPDQIIKNLYECHGTNGKLVLYYCKNQAWG

SEQ ID NO: 42976 - DNA, 3170 bp, DROSOPHILA
ctgggcggcctgatccagaatttcgttctctggtatggagatcaggcgctgcgatagattctgaagcagtctgtggggataaacaattgttattaataagagctttcttgaattgtacactatgaacttacttttctagatgctggagggcatggttcatgggcgtgtgatccggaactccagcgttgttgccccgaacaaaattgtcaaagcaactgaatgtcttgaactccatgctgcaaatgaaaatgcgtttatattatttataaattattattaaaatatgcaaaaactaaccgcacgggccggatgacgatgatgtgtgaccggggaaaggcctcgcgcagaaggatggccgagttttcgaggttgtacttcatgtagccccgactgtcacggttcgtctccatgctctccgggaagtcctgcacgtccccaccaaaatagattatggccgtggagtcctccggcacgtgcaccgagtgctggcgcacgatcggcgggcagtagacgatgtcattggcccggttctggaatccggccacggaaaagatgcggaatgggccggccgaagtgcttggcgtgcacagacgctccccgctgccgccgccaagcatgccctcgaagttacggatccgctcttgcagttgcaggaattgatcaatggtgagctgcgggatcgaatcggttcatgggggattactttacttggtgggcattaaccaatcacagcatcattttcacagcttcacacacaaacgctcttttttgaaaactttcacaaatcaatatactttcgaaagttctgaatagaataactgatgatatagaccacttctgttacagaactataaccctaaagctaaatacgatcttcttataatacacttgctttttctttagttccatcagaatagaaccatttcggattagtgatgaaatataaatctaaataagggacgtccttgtttgaaacccctcctaacaacctcttcttatcctagtagtaatcatcctcgtacgcgtccctaggattcccgcaacagccaacgaatcgcagcctggtgtcctccatgcaaagtttggcgtcctcgcgcatctcgcgtgcctttaggcgcacctcttcgcgcatcaggttgcgacacatggccaccagacccatgcccagcagcatgtagacaaaattgatggccaatttggagtgctgatcggcggccacggactgtagctgggccagctcggcaggatcggctgaaatgtcctcctgcaacttttgcgtcgctgcattcacatccgcactggtagtcagcgaggcaccgggcacaaagtcgccaaatccaatcttgcacagcgaggtcatgcagaagtaaaagctgttcagtaagctccacttctcccaattggcaaacatcacggtgccggtgagaacgtaaaagaaaatgacccacaggcaagcggtcgacggcacaatgacctttttgcgtgtcatgccaacaccaccctcaagggcgtccattcgatccaggcgcgggtgctcctgggtgcagtcgtgcagtgatcggtagaggaacttaaacgatctggccagcactctgcccatgttgaggaagtacaggatgtagagcggtatgccaaaggtggcatagatcacggtgaatcccttgccccacggagttcgtggcaccatgttgccgtagccaatcatggttatcaccgacaggcagaacattagggcagccggaaagctccagatctgctctggacttctgcccacatagccgtgtttgacaactccggctatttgcgactggtactccctcagtacatcgttcgtggcctccgtccagcgtcgacgatcgattatgttgtgctgctccgtgatgctccacagctgctgggagcagttctgacgcagctccatcacatggccagccgtctcgtccacaaactggcgctcgatgtgcatgaaggcgaatgctccacagatggcatagatcacgatcagagcgcccacgcccacctgggtgcacataaaggtgacgaagttgcggcagcagcgtttcacccttttcctcggctggttgctcggcgtagaggaaacactcgatggcccccctcccatgcctacagttccgccgggagatggtttcctctgaaatttgctggccattttagtcgcacatggattatataaccgattccacagattccggatatctcccttctggtcgaatggcctttgagcccgacgatgtgcaattaattggacagttatcgattctcaatctgatttagagcacggcggcgagtgtggaaatcagcaagttgtctaaaaatagacccacgcctttgcacggcacattttccacaagatcaaacgtgagattttcccgactgcacaaccgatcagcgcgggcgccaaaattcaactggtggaaatctgtttcgagggaaaatctaccaagactcggagagcaaacgagcggaaaagccagtggaaagccgaatgaatctatggaaaacaaatattgcggctcagatatttatgccagcaagtgcccgcggttctaaatcaggccatttacgtcaaatttatggacggggcaattaagacatcactgtggtacaggtgcaatatgcaacaatatacaataatctgtactgaaaaatagttacgattaagcatcttattatcatatagtacttcaattaattgataacgattttgtagaaatttcattgaaataactattgatatgttaggatgtcataataactaatgagtaatcattaggtttttatcattttagtacagtgagtacagtacagagagtattgaattggagaaaactatttaatgtagctattcgtatggtcctaaatcaagatttaaccgattttatcttggcaaaactaattctgcaaagttatctgcttggaataaaagtgctgatacacatattcccctgacaatttcctgcaattaagcaaatccgaaagatacagcctggtagtgttggtcataaaatttcggcactttgattgacgacgggtgtgtgtggtggagcagacggcgcgagagcttttgggaatctcggaattgaaaacggaatcagaattgggcgctatttttacggcgcggcgataaatcaaaacgggaaagagcatcc

SEQ ID NO: 42977 - DNA, 1170 bp, DROSOPHILA
atggccagcaaatttcagaggaaaccatctcccggcggaactgtaggcatgggaggggggccatcgagtgtttcctctacgccgagcaaccagccgaggaaaagggtgaaacgctgctgccgcaacttcgtcacctttatgtgcacccaggtgggcgtgggcgctctgatcgtgatctatgccatctgtggagcattcgccttcatgcacatcgagcgccagtttgtggacgagacggctggccatgtgatggagctgcgtcagaactgctcccagcagctgtggagcatcacggagcagcacaacataatcgatcgtcgacgctggacggaggccacgaacgatgtactgagggagtaccagtcgcaaatagccggagttgtcaaacacggctatgtgggcagaagtccagagcagatctggagctttccggctgccctaatgttctgcctgtcggtgataaccatgattggctacggcaacatggtgccacgaactccgtggggcaagggattcaccgtgatctatgccacctttggcataccgctctacatcctgtacttcctcaacatgggcagagtgctggccagatcgtttaagttcctctaccgatcactgcacgactgcacccaggagcacccgcgcctggatcgaatggacgcccttgagggtggtgttggcatgacacgcaaaaaggtcattgtgccgtcgaccgcttgcctgtgggtcattttcttttacgttctcaccggcaccgtgatgtttgccaattgggagaagtggagcttactgaacagcttttacttctgcatgacctcgctgtgcaagattggatttggcgactttgtgcccggtgcctcgctgactaccagtgcggatgtgaatgcagcgacgcaaaagttgcaggaggacatttcagccgatcctgccgagctggcccagctacagtccgtggccgccgatcagcactccaaattggccatcaattttgtctacatgctgctgggcatgggtctggtggccatgtgtcgcaacctgatgcgcgaagaggtgcgcctaaaggcacgcgagatgcgcgaggacgccaaactttgcatggaggacaccaggctgcgattcgttggctgttgcgggaatcctagggacgcgtacgaggatgattactactag

SEQ ID NO: 42978 - protein, 389 aa, DROSOPHILA
MASKFQRKPSPGGTVGMGGGPSSVSSTPSNQPRKRVKRCCRNFVTFMCTQVGVGALIVIYAICGAFAFMHIERQFVDETAGHVMELRQNCSQQLWSITEQHNIIDRRRWTEATNDVLREYQSQIAGVVKHGYVGRSPEQIWSFPAALMFCLSVITMIGYGNMVPRTPWGKGFTVIYATFGIPLYILYFLNMGRVLARSFKFLYRSLHDCTQEHPRLDRMDALEGGVGMTRKKVIVPSTACLWVIFFYVLTGTVMFANWEKWSLLNSFYFCMTSLCKIGFGDFVPGASLTTSADVNAATQKLQEDISADPAELAQLQSVAADQHSKLAINFVYMLLGMGLVAMCRNLMREEVRLKAREMREDAKLCMEDTRLRFVGCCGNPRDAYEDDYY

SEQ ID NO: 42979 - DNA, 5591 bp, DROSOPHILA
cgatcgatgatctattggtttctcacagtagcgaattaaggggcgtttggtccttcaattatctgcggtgccgcacgcttcgctatctttaatgccattttggtgagccgcaaatgattatcctgtaatcctttggataaatattaaatttcaattacgccatttaacatattattagccaccgatcggcactatcatcatcattgggcaagtcacgtgccgtcgaggagctgatagcaatctacgcaaaagcgaacaaccgcaaccctccgtttctgcagaaacaggcgtggtgacagcccgcaaaggatgcgactgcaattttatcagattatacatgtcgacggagtcccccgggagtcctcccgccatccacccccttggtcctcctcaacaggtgagcgagtccaacgaaactttgtgtgagaatttttcggcctttccccgattctgctcccctctccatttgtatcgggttaccttgcctcacccgattggcgctgtgatttgtcgttctcgagcattctcatgaaattaatttgaaacggagtatccaggatggatatcagttgaattaaaacaattattccaggattcagttaatttctagaccatacataaaattattattacatcagcttttaacagtaactcctgttatagcttacagaggctgttaatttttagggtgaaccaggtttgcttatttgtaattaatattaaataagaaaaaaagtaatcatgggcgtgacaaaacgaaagcaattcacaagaccaataaaaattgaggtactaagatctcgacgttcggatacggatgatcctgatctagaatatatcaactttatgttacatatttttacaattttactctacgagtaacgggtaaaatgtaaccagtagttgcataattctttctgaaatatatgtgtattaggagagggatgaatggacgctcattacttttagtaaaatgtcttatagagcaaattggtttatattttttttttaacatatctcaatacctagaagaacttttttaaagatcatttgactaagaagctgcagctacaaaataaataacgagaagcaataagttgaaaagttcaaaacttgtcagaattgtcatatctagttacctagcaaaagatttatcgagtgactgtcaatatatattacatgtaatacaaaaacggtccccttgcaaatccaagccgaaatcctgtgccaataagaagtcgagttccccgactaacagatacccgttgctcagttagtgtgaatgcgctgtgtctatgtatctagaatctgtatgctgcatcacaaccttctagcttttaaagttcctgagatctcgacattcagacggacagaggaacatggccagatcgactcggctattgatcttgatccagactatattctagtcttgattctagtatacccttttactcacgagcaaccgatataacaaccaagatctttgtaatatattatatatagtcagaaatttgatgtgcttttttttctgacagcaaatatatcatattgaaaacgagccacatttaattatacaaaatcatttttattgagaaaacttaggctacagtaaactcccccttaaaaacaagaaaagtaaatcagtaaattgtgcgttggctctcagccgcagacacccgtctagattttgggatcctggggcgtaagcttgacaatcttcacggactcctcccagatcttgagacccttctcctcatcgagggcagcagcattaagggtggcctccttgcagtccatgaagtactttccagacacattggccacctcattggatgtggccaaatagatagtggtctgggcgccggccttggtggtcttgaagaatcccttggtgatggccatcatgggcaagttgagggggaagggaacgttacgccaaatgcccgagtcgatcatgccgggatgcaggaaattcactgtaaccttggtgccctccagccgcttggccagctcccgggcaaagtagatgttcgcaaacttggacacatagtataagtaggcagccgggaaagtgccgatgggattgagcttggccaggttaaccgacgacaggcggtacagctccgaggctacgatgactatgcgagccggcgcgctcttctttagtacatcgatgagcagatgcgtcagcaggaagggtccatagtgattggtggccatggtcagctccacgccatcctcactcgtctgtccgcggaaggccagagccatgccggcattgtggataagcacatcgatcttgggctcggtcttcacaatgtcagcggcgaactcacggacggacttctgggagcccagatccagtttcttgactaggatcttgttgttcttcgtctccttgacgatctcatctgtgggaaatcaacaataaattacaaaattcggttatgtaaaaaaaaacatggttaatgcaacgccaacatattataagatactttctttaaagtaattacaacgtaaatatttaataaaaaaagatcattggtagtaagcagtttttgccagagtctataatcaactggatgagaccagttatcggaatttgaccgtgttgcatgtcctgccagatccttggcataacctcataggcattgtcttggtccacttacccttcactgcattggcagtctccaggttcctgcaggccatgatgatgcgggctccacgtccagccagatccttggccgtctccttgccaattccgctgttggcgcctgtgataatgactgtcttgccctccatctttgtctgtaatcaatgtcgaaggttaatcatttaatacggcgctgcaatcgaaaattggacgagggcggttcgaaaatatgtttacaatactaattagttggcgcttgttcacagtcacagtaatcgcagttcgtctggaacggaagctatcttagttttcagacccattaacgggtcgcttaattgccattcgagtgctgagagctttctgtgaatcagaggtaagcgatctcacagattgtaaccgagatacccagaagcttagatgttttgtgggatacgaacaatgttcggtcaggtggtaatcgtagctcagagatgtgacgtacctcgcctctcagaaggtatctaatttaatctgtaattaagtcgacgcgtcacaactgaccaatgtaataacaagattgaaacacgttaagttttcctagtggtgatttcatatatagttaaaagatttccatagtcggaatgcttggaatgctacagaatcgttttaattatatggggtttttccagatagtgatatatgtagttttctatagagcggtaagctgaaccattttcaattatggatctgtaatgtttatctgaatagttcgcatttatatgaatatataaaatttgtaaaagttttgagcgattaataagcttaaggtcgtgtccgaatactgttttagtaaactatcccaccatcatttgtatgtatatgacagctcatctacaagatctgaaaagaattcgcagcggaagtgggagcaacagccatataaagtgcgaaatattcgagtcgtgtcgcgattctggggagcatgggacttggttttttggattgggtgaggtgcgttcgttacctcggtgaaacatcgtcccgccgtgatgcgcagatagaaccgaatgctcatcagggtggccactatggcggccactgaagtcatgaggaagatgtcgcgcacatagtgctcggtcgacagccaaccgaagatgaaacccatcctacaaatatgccgaggtgtgtatactatatattgtatcttcatatacgtatatatcggtgtcaacatgcaaatcagattatataataaccgaagctgccaaagccagacgattgtcttagggcataacgaaacgagtttggttttgggttttggggtttcatggttttggggatattggttagtcggcgaaggttttcacaattcaaatcgtttatcagtgactgtcaataaatcaatttcgaaaactgttgagaaaacttacactttcactttcacacatgtgcgtaattatggcttattatgatgaaacgccgaaaaaaataacattcaaccaagttcattgacagcccaaacgaaagaaggttgaacaagaaagaaagtctgaagtttcatgtcgttttgagtttctggttttttcttctctgtttgttttttttttcccccaccgtccacgtcacaaagatttccaagagctttcctcaagactcgaagactggctctggttacgcttgcatgcaccatttaagaacccccccaaccgaaccacgccctacaatgcagtctcgaaaagaaacaagatctatagatgtatgaaaaagtctagaagtgacccgtttttgggttttgttcctcaacttttgccagtcggagacgagttttttagtgcaaactcacctgttttggctgttggctgatctataatttattccaacttctgctgacctgcactttggactatatctgcgctgcgaaatggaattggtggatccaagagctagtgccacaaccttcgccttgaacgactaatcggagactgaagtcggaattccgattataaagccgaggctgcggagaatgcgcgatcgtctccaccggtttggtattgccgtggtcgcggtgattttgttattgcacttatagccatggtaacaggttagccaagcggctttccgggctcctctttgggatcgtcttcatgaacggttcactcgcagcgaaagagcgagcacagagtggagccaaactataatacatagttaccagcggtaagagaaagatctgggtagtggattccaagaaagtgtgtctagaaagccacctgtcgggggcttcgcaaagcttcttttctagttatgcagctcgaatgatgagcttgaaataatgtagaaaataataatggatagtaattaacttttttaatgaccaagactttattactatttgaagtactacgggtaattgtataaacatgtcagataaaaatctattttatttttcatttcatatatcattaaccgagataccactgaaatatatcaacattcttttcaattcaatgcattttattatagagatgacatattcacaagtacaataaagaatgctcaacaatctaccacaagcttagtctaagcccgtctagttcgttgccttagtcctgtatatagctttatttgaaaaatataattcccttagaattatcgctcaaatataattcctttgaatgcagtaatgtttgaaaataaatatatatttacattcggttataatgctggcagtttaaacaaggtcatatggtaatataagtcattctacttctcaatgctgttttgtcggcggggtggttgggtttccgcatccgtttccaagtgcttggttaaggtgttgtaccattcgttcatatggttggatatgatgttgatgaagcgagatacctttgatttcatagtgctcacgaggctttcggagagtttagtcagactacgaccagaggccagcgaattcttgctg

SEQ ID NO: 42980 - DNA, 1112 bp, DROSOPHILA
aaggttgtggcactagctcttggatccaccaattccatttcgcagcgcagatatagtccaaagtgcaggtcagcagaagttggaataaattatagatcagccaacagccaaaacagacaaagatggagggcaagacagtcattatcacaggcgccaacagcggaattggcaaggagacggccaaggatctggctggacgtggagcccgcatcatcatggcctgcaggaacctggagactgccaatgcagtgaaggatgagatcgtcaaggagacgaagaacaacaagatcctagtcaagaaactggatctgggctcccagaagtccgtccgtgagttcgccgctgacattgtgaagaccgagcccaagatcgatgtgcttatccacaatgccggcatggctctggccttccgcggacagacgagtgaggatggcgtggagctgaccatggccaccaatcactatggacccttcctgctgacgcatctgctcatcgatgtactaaagaagagcgcgccggctcgcatagtcatcgtagcctcggagctgtaccgcctgtcgtcggttaacctggccaagctcaatcccatcggcactttcccggctgcctacttatactatgtgtccaagtttgcgaacatctactttgcccgggagctggccaagcggctggagggcaccaaggttacagtgaatttcctgcatcccggcatgatcgactcgggcatttggcgtaacgttcccttccccctcaacttgcccatgatggccatcaccaagggattcttcaagaccaccaaggccggcgcccagaccactatctatttggccacatccaatgaggtggccaatgtgtctggaaagtacttcatggactgcaaggaggccacccttaatgctgctgccctcgatgaggagaagggtctcaagatctgggaggagtccgtgaagattgtcaagcttacgccccaggatcccaaaatctagacgggtgtctgcggctgagagccaacgcacaatttactgatttacttttcttgtttttaagggggagtttactgtagcctaagttttctcaataaaaatgattttgtataattaaataaaaaaaaa

SEQ ID NO: 42981 - protein, 287 aa, DROSOPHILA
MEGKTVIITGANSGIGKETAKDLAGRGARIIMACRNLETANAVKDEIVKETKNNKILVKKLDLGSQKSVREFAADIVKTEPKIDVLIHNAGMALAFRGQTSEDGVELTMATNHYGPFLLTHLLIDVLKKSAPARIVIVASELYRLSSVNLAKLNPIGTFPAAYLYYVSKFANIYFARELAKRLEGTKVTVNFLHPGMIDSGIWRNVPFPLNLPMMAITKGFFKTTKAGAQTTIYLATSNEVANVSGKYFMDCKEATLNAAALDEEKGLKIWEESVKIVKLTPQDPKI

SEQ ID NO: 42982 - DNA, 2424 bp, DROSOPHILA
gggggttttacttaattatttttaatcttacaaatgtctggtgaatatgaaatttattgcatactggtgtacgttactaaatatggtcaatatgtacataatttattataattaattatatgtgtttttattgataatatatgtttatataacatttgattcaaaataagaatacataactgaaggacgtttttcaaattgttagaagtgtctttataaactataatcatttgttctaaagttttcaagggctattatttcttatgttctttggtcaaaaacattttcgcgaaaatttttaattttttgcacaaagtatgactctagtgcttcagcacacttataaaaggatgattcttttgggttatagtaacggcagttgtcaaaaatttttgtcatatcgcctataaactcagatagtttggtataggtgtttgattcgagtttaatttccatccgtttgagatctatagaaaaaaatatccccattttatttattttcgaataaatttattttttgtgttacatacccattggctctttaatcactttgtaataatcgggtgcttccttcggatcaaccggttccataaatggccaagcacttttgtgtaactgtagggaaatttaatatttattccatttttgatgtgctacagttgagagtttttcgttagccagaaatgaatgtgaaacgaatgaacgaattggatatttgattcacttggtcttgaacttataatactttcgttctgttcgttactttgtaatattttttcaacaattttacaaacattaccgtattttaacatgtttgatgccatcaatatataaacgatttgttcgtttatctaacacagaataacgattcccacaaaattaaattttatttaattaaggtccctaataataaataaaaattattatgaatttcaggttattacctgcatctgcttaattaagtttttcagctcttcaacgtcatttgaagtcagtttcttcatatttgcagcgttagcatcgtttttgcgttggcattcagggcaaacatattcatcaataaactctgcttcgctctgaagtattccaacgcaacggccatgaaaccaatcctggcatttatcacagcatatataaaattgtgactcgtcgtatggttgacgacagctacagtaaagctgttgcgtttctctcgccctcttgcaatcaatgcaaatgaactccgatagttttttagaagcttcctcggtaatactgacacaatccccatggaaccaattgctgcacaagtcgcaccccacgtaaaacctacatagacacaattacaatatattaattaaaagcgcgttaagaatatgcatttctgcattactttgtgtcatcatatggagtacggcaaatgcaatacaacttttccttttttcttgtcaacttttttggtcggcctgcgccatgtctggggttctgcacctctgtcctacgatttgatttaggtattattagatatatcatattgcacacaagtgcatgagtatacgtaccgtttaaaatctaaatttggttcgccacttctctcattttcgctttgttcatccggtgaagcgttacttaaggggcgtacatgtctttggactttagtttttacatcttcgtgtatttcgctttgtaaattacgctctaataaggaacgcttgcgcaaaatattttttttaagcaattctttatgacgttccaattgcgattgcttttgctctccaagttcagcgacttcgtcattcttgctccgatttttttttaaaattcgattaaattggctgcttgttgtcatagcatttgggcgtcttaaggaagtacgaattttccattcagtgtcatcagtttggcgactgggagttagtgcttcctcattcacactgccccttgagcatgtttcccactcattcgtcgaattcgcattttcttgttgcttctgcatacaaacaagtttttcttcaagttccggacttaaattaccttgtttcagagcatttgaaatagctgaaaatcatggcacttattatttcaaacacatttgtatttttattcattttttaacacttacacttctgtatgtatcctctggtaacaacgaagctttcgttttgtttattttctaagtctgtttctgatatatcgaggccggcaaggttagttggttcatcatgttctgaaccctctaatagggaagatgtaccggcaaaggactcattagttgtaatattagaattttctgtttctgcacatttactgttttcctgatcatcgccattattaatagcaatatctttaatagttgaattggcttcgtaagttgttgctagcgtatcggcgtcgatttcgatgttgttggtctgcaatgaacatcgtttaaggtcttcactttca

SEQ ID NO: 42983 - DNA, 360 bp, DROSOPHILA
gaaaaaaggaaaagttgtattgcatttgccgtactccatatgatgacacaaagttttacgtggggtgcgacttgtgcagcaattggttccatggggattgtgtcagtattaccgaggaagcttctaaaaaactatcggagttcatttgcattgattgcaagagggcgagagaaacgcaacagctttactgtagctgtcgtcaaccatacgacgagtcacaattttatatatgctgtgataaatgccaggattggtttcatggccgttgcgttggaatacttcagagcgaagcagagtttattgatgaatatgtttgccctgaatgccaacgcaaaaacgatgctaacgctgcaaatatga

SEQ ID NO: 42984 - protein, 106 aa, DROSOPHILA
MMTQSFTWGATCAAIGSMGIVSVLPRKLLKNYRSSFALIARGREKRNSFTVAVVNHTTSHNFIYAVINARIGFMAVALEYFRAKQSLLMNMFALNANAKTMLTLQI

SEQ ID NO: 42985 - DNA, 14509 bp, DROSOPHILA
gcgaaatcacaaacacagccggacgcgtcgccaaacggcgcttgtaaatatttttgttaattgtacatttgaatcgcggaaaatgcaatagccagtgcaaacaacagccgttaactgctgtcgcagcgcagtaataagagcaaagcccttaacagtaaaaagtaacatacagtttgtcttataaatctccaaaggccaaaaaaaaaatcaagagaactttacaaatttcatgaatgaatttactaaagtcttgcaaacaaaaaagaacactgccgaaaaagagtgcaaattgctgtaaacggaatttttcttcttttttcgcttgtgtatgcatcacttttcgcagttgccgactgcagtctgtaaatgtgtttgtgtgggtgacttgaattttcttttttatttctttcccttttttcattagtggatgtggtaaacgttgcgcatgacttgtaaagttcaagttttccttgaaggagggatatttttttcttttattgttaaacaaaatgcaatattgtgcgtaatttgtcaattcgccgtcgccgacgacttggctgagtggtaaattcgccgctccgccgacgtgcaggtgtagtggtaaaagagagcagtcagcttctgcttccgttttgtgcgtgtacggcctctcgctggcgtgtagttttttttagttttgttttgctttccatatttcggccgattccgctttatgcttgagtttcgcccaagcggtgcggcattgccaacatagagagcggagtaataacgaagattgaagttgaaaaatgaaaccaattgatgaatggtatcttcaaaatacaagtgttgtgtattcacttaagttactattactgtaaagattctatacatatggcaacatatgtaaaaaaagaatacaagtaaatatcttataagtattgcattttctaaatcctttgcagactcccaacgcatgttacgcacaatagttggtcctaagaactaggggattttgaacatgaacaaaaatgccggcgatggcagcgatggcaaaaactcaaacaaaaactcgaatgcgggagggggtggtggagccggggggccacacgaccccaccggccttttagatgcagcttccctgttcggtaagacattatatattttttcagttgcaaatgatgatcttaaatgtttcttccattttcagcttactggggacgtgatccaactggagcggcggctgcagcggcttccaatccgctcttcaactcgcagttcaatgccgccgctgctgccggattgggtttattgccacaagctggaggcgcctctgccaatgaccgttattccatggcagcagcagcggcggctgcggcgggagcccatcaccaccagaacacgatggcagtggccgcttcccaggccgccagtttggccggtttgcatccagcaagtgagtaaaatgtcggcacattccgtattttagtagcactcctctagaagacatttgtgacgccacgaaattagcaactgctgtggtgcggtgtgttaaggcgacttcgtcccatgaagaaccgtaaaaaatctacgcgagttcgaatcccgcttggtgaaagaaatttttatctgcaaagtaatttccctaaattgtgcggagtataacagaaaatgtcttgtctatcgcgcaagaacgtttgaagaaaatactcctagagcatttagtaacttgctattcgctttacactggccactacgcttcacccagagcagggcagtgaaaaatggtcaagcacaaatattttagtgttcttttgtatgttatatcttgttctttaaaatagtatttccttcgctcttatgcgccgtaaattaactaaagttaaagtatttatttgactcaactaagcatttgcatccatttttgtgaaatcactgtactaactcgctgctaatcgatttacaggctggtggtcaatggcccagttagctgcccaggattacttcagtcgcctgcaagcctcgggtctttccccctttccacatcccgatctggcggctgcctttggaccagctgggatgggaatgggcggcggtgctggtggagcgggtgctggaggtggtggagcaggtgtactcggccagggcggcggtggaaatggcggaagtggcaacggtggtggtggatcctcatcgggttcttccggcagcaagtcaaacaagtcgcgcaaggagaagcgagccgcccagcagcaacaacagcaacagcaaaatctggccaacagtctaaatgcggcagctgcggcggcagcagcagcagcagccaataatccagcagccgcgctggccagcatgcatggttttggtgtaggagttccgggcacgagcattccgtcggtgagcacaggtagcggatcaatatccacaaatagtggaggtcatggaagttacaaggtaagtgcaaacgcgaaatacctaaatggaaattcttaaatccctttatttaatacattagagcacggccagcgcttatggtaagccctcgactatgacgagcagcagcatggctaataatccgggctctgcctacgatccggtgaccctgcacaaggagctgctggccatgcaggccgtggcagccgctgcttccggctcaggatcaagcggttcctcaggcaagaagtccggtgggggtggctcctcatcctcctcgatgcacagccttggaatgggaattggtggcagcggtggcatgatgtccagtggcaaagcttcgaccagtgtgagcgcaagcaattcatcattgggaggaatgcaccccagtttgactagcagcaatccgctgatgtcgccccatgcgggcatgggctcctcgtcgtcatcatcgagcaaggatcgtgacaaaaacaatccctcgctcaacgctcttaactcgctctcacagtttggagccctgggaatgacgccacagcagagcatgcaggcggcaatgaatgcttttgcagccagcacaggagtttcgccatccgccacggtaacgtcctcgccgcaccactcttcccagcagcaacagcaaatgggagggaacagttccacgtcgggatcgggcaagtccagttccaaggattacatgatggggtaatttaggcttgagaatcgcactgttttacattattactaaatatattgcccccttacagtactggaagtgagcacccatctctgcttggagttcgtttaccaccggacacggagataatcaagtacacgtcctcgattgtgggacccaagattcctggtactacctcgcgcggtcgcaaaaagactatttccgaaacagaacagcaaacaacacaacaacaacagaaacaacaacaccaagcagaacaacacctactccaacaacagcaacaagcacaaaaagagctcgacagcaccaaaaatgccatttcctctctgcttgcatttccaggtctcagtcccgcgaagcgggctagactcgaaatggagtacgcggcgatggctgcggccgctcaacagcagcatcagcaggcacagcagcaacaccaggcgcagcagcaactccacgggatgctcggagcagccggtatcccgggaatggctggactggtcggtctgcctggcatgagtggcaatcccctcgatcagttgagtgtaagcaaggccagttcttcaacggcgcccacaaccagtaccagttcctcctcagcagggagcaacctgctcaaccagagcaatagtgatcgcgtggaggtaatcaaactgccaccaacaattacttcaaacggagcctataatctctcaagtaagggaaaagaggtgcacgacctcaccaccgacatggccaccaactctggcggtgtgaatctcagcctaaagtccaatgctggctccagcgccttgacgcccagcggtgccgtcggatcggccagcaatcccattaccatcgatgactttgacgcaccacttaatctttccatgaagccctcggataagagcaatagtagctcgtcaaatgcagcagcagggggctcctcctcttccagcgcagcgttggctaacttggcgagcgattatcaggcagcgtccagtgggcaaagcggtaatagtctgcagagtttgagctctattacagctgctttgggtggaacaggaggtatgcctggtggttccatttccggcagcggaggaacctctccagctccagctggtgccggatcaggagccacgggtggtggttcgggatctggtggatccggcggtggatcgtcctcttacaaagagggaagacctcgtaacctgggacgcggcgtatccaagcccaagaagaacacggtagcttcgctgttggctcaatcccgagctgtgggccttaaacctatgctggccacgcaacaacttcttcaacagggtgctgatattgtgagttaatcaatgcataaagtcatgacataccatcaaactaaatacttacgacttttcaggagaaaatccgcctggcactgagcgaagcgaatgcccatatggaaacttctacagattccgaaagcgtggcagccgaaagtggtctttcggagtctgagagtgaggatgccaacattctgaatgtagcggagctaagggtgccacttgaattgggctggaaacgggagacggtgattcgtggactgactaagcaagggcagatccgtggagaggtcacatattatgcaccaggaagcacgacgccgctaaagagcaacggacaggtttttgctgtgagtttgtagggcgacttttttgaatatattaaagcaaattctataacacacagtaataactctaaaccactaaaaatgtataattggagttttgatatgtaatcagaatagctttaatttatggttttcttaattttaacttttcacaagcataaaattatcaaattggctacaatgcacacaaggatattcactttctaagaacttagctaatttattgaactcttcacagatcctggagcagcagccatcgaatctaagtcgtgaaaactttagtttttccgcgcgagccattgttggttcattcctgcagcctgcaccaccgccgtacgccaatgatggcgagtacatacggatgacggacgaggacgtggccaagcggttagaggatctgaaggtcttcacccgccagactcttaacgtggaacagcgaattgagatcgccaagcaacagcaggcgatgcgtgatgctaagaagctgcaaaaggaagaattggccagaaataaggagaaggcgcgacaggagaagaactccaagttggagcagcagcgcaaggacaaggagctcaagaatcagcaggctgttgaggtaatttgaatttgtaagacttgcgaagattatctgctcatgcgaactcgtatttttaggagcgcaaaaagcgtcaggaggagctagatcgccttaagcaagaggaattgcttaagaagcaacaggttagtctagattaattaagctttgctgaaatcagtgcataattctgttttgttttgcaataggagaaagaaaagcgtcgtcaggaggccattttagctaaggaacaggtacttaatgcctcaccttatgtcttgtgcttgataccaatccgactactttccgtttaatatttgggagaaaagaaactagttctagcttttcaaagagagatttatttattttatttcaagacttgtttgctttgcctttaattcctatttctttctgttgcctatactttaaactgtatttactgttgccaggctggtgatttgggctattgaatgagatatattccaaattggttgttcaacttttaatcgtgtttcggcgttattatttgaagtgtccgatctatccgcttgttggttttttgtttagtaggggtcgtaaaagaccaactttgccatttcggtatcagttactactctcatgttattaaccaaaaccaatcttattttatctaggaactacagaaacaaaaagagatgctgttggctgccgaaatggtaagaggactaaccccttcttcggttatgtaataaaatgcattaaattttgttattttctcttcataaaggaacgagaacgtcgccgccaacacatgagcctcattcgaatgttggagcttcgtcggaaattcgaggatcgtgaaaagaagaaacaccagctggttctagaccgtttgcttctgcgtgagcgtcgtatggcggagcgaaaacgagatgcggagattctgcagttgataaggcgtcccaatgaggactccgaaatgccacaagaattggtaatccctgaactggataggattgccggcaaccgacttcccggccaggcaatggccgatttgctcatggtctttgaattcctacataactttggggagactctaggctttgacatggaatcactgccgtcgcttcagaacctgcacgatgctttaatgagcgatagcaacgcggatgcggaagaggagttgttgtcggtgatgacgcatctattggtttgtgccattgaggatccaggtgttcccaatcccggcagacacaccactttactgggacaatcgctacgcaatgcggacatcaccaactcgaatgtatccgaaatcttgaggatttatctgtatgctacggccacaggtgaagtgcgtcaaatgcacggaatcactgtggatcgtgagcgagagagaagggtgccggatcatcatcaactagatagcgataccacaacccactcacattcggtaaagaaccaggagtactataagcttctccatgaaaacgacacctggaagttgtcgcaatcgctgaaagatcgccccttcgttgcgttaaatcccacccgtaaagcccaaatgttggcccatctatgcaacgacctgctcatgaacaaggccgtgctccgccagattgatggaagtctagaaacgtgcgcccagatgcgaaaggagaaatacatgacggacatgaaggtgcgcaagtacaaggctctccacatgcgcaaggctcgaattgaggcctatgaacgagcacaggcggagcgtgaggcggctatgcaggcgttgatggcacagcagaagctggatgcagaacgtcttaaggcggaggaggaagccaaggccgcggcggcagaggaagcagcagctgcagcgggcacagatggagaggcaaccaaaggtggctcacccaatggcgagaagccggaagacggcgatcagaatgaagagggagccgccaaggaaccccagcagcagcaacagcagccaatggaagtggatggcgtggtcgatgaggcatctcttgtaagtccggccaaaaccatcattcaaacggacaatagtctgacgcccagtaaacaggacatgcccacacccacctaccaaattaatggatccagcacacctaccacaagtggtgtcactggaggcgacatgaatgttctgctgcaggccaagaaaagcggggcccgaaactccatcaacgatgaacaccaccatgatgttagtattatcgacgatgatctttccgacttggattcggagatcacgaatgtcgaggaggacgaggacaatcgcttgagtgccgatgagttgcaaaagaagctcgacaagattgtcagagcttccctaaactgcaaggaggcactggagaagagcacaaatcagttgagagctgcgtgctttgggcaggatcgcttctggcgtcgctactggaagttgcccaaggctggaggtattttcattgaagcacttgagtcggcccaaaatgatatttgcgattatcatgaggcattggaggccatggatgacaaaaaggatgcaaacgacgagaaagagaactccgaaaatgagaaggatgttgcagcggagtccagtgagcagccaatggaagtggatgagtccattacaaaactggaagatggtgtaccagcttcggacgtcgggatgcctgaaagtaatcaacagaacgcacatcaagatgaggaagatgacgatgatgatgtgacagaaatcaacaaggtggaaccggaaattgttgatttgggtgatgatgacgatgatgcagctcccccgctgcccaagatagaacctcccaggccagagattaaagttaaatcagagatggagctgatgggtccaccacccacgactatgatatccactaagacagactttgaagctgaaattaaaataccctctatgcctggcatcttgatgccgcctaccctcaacaacaacaacaccaataataacaataacaacaatggaagcgacaactgtgataagttggaaactggtttgggactaggacagcagcagcagaactttagccagtctgtgatcaagacggaggatgtgaaaaaagaggatgattgcataatagtttctacatccagtgttgacgatacaccaaagtggttctccattgtccggcgggaggttccattgatcagcgaactgccagcggaggagggaggcgtggtgggccaggaacttcagatcagctatgcaaatcagaactgctccgctcagctgcagctgcaaggtcatccgtgggatctgatcaacaacatgcagtactactcgattccgatggacgaatgcaaggtggacaccagcaagctgggcaacgagtgcatcttctcgctgagtggcctcgatgaaaagcaaatgctagccaaggtggaggagtacaaggcccacaaggtggagtcaaaaaacggtctgggctctcctcatcgccaccacgagactaaagatgatgaggagcaggccaagctgaagttggacaaggagattgacaccgaaatggaaacagatgcagatgacctagctggcaaggaaaagttttttcgcttgcgctctgatgtacccccggatacgggaggaggggtcagcgagggaaccgatgtaaagcccaagattgagcttcgtttggatgaggcgttgtcacaggcatattaccacaacatagccaacatgtcattgagcagtgttcaaacgtatatacccatcgatatccctctgccgctttccatgacccccgatgagcatcgtctgctggagcaggtcaagctggcaggttttccggaacgagttcacggagtttacgtgccccgcagacagcgctacggctggtggcagttggacgatgaacagaagctgcgccagctgctcaaaactctcaatccgtcgggattgagggagcgtgaactgcaggagaatcttcaacgattcctcggactggaacagccattgggtgtgaattataagctgaaatcggacatcgattttccagaggaattcctaatgcctgacaagaagggcgattggaatcccaaggtggccaaacgtgtggagcttgcccttatcgaacaactagaatcactggaggacaaggtggccagcgcttctatgcaattaaagaactggcaattgcccaaccgcgtggagagtgaactcaccttggactcgcaggaggatgtcaccgaagaggacttcgtcagcatcatacccatgatccgagagagaatcatcgacttggaggcaaatatcgaaagacgttacttgaagccgcctttgggctcgcagacaggcgatgcccatttggcggttattgctcagaaccagcataccaccacccagacgcagaactctgcatcggcagcagcatatctcctgcagatgcaacagcagcagcagcaacagcagttggcccagcagcagcagcaacagcaacagggttcgggtgcgggaaatagcctgaatccctcatccttcaacgagcgtactatggcattggcggcggcagcagctgcttcggggccaggaaacgcaaccggagtagccaactcggcagtcgtggcaggagccacgccctgcgaatcgggcagcggagaaccgaattccggcaacgcgtcaccggccagcaactgtgacagcgatcgggacgagaaggtggagcagatacccaagggattggtgcagtggcgggacgcagtatcccgatcgcacaccaccgcccagctggcgatggccctgtacgttctggaatcctgcgtggcttgggacaagagcattatgaaagcggtaagattaggaggattttgaatacctttaaaatttcccgatttgaaaacgataacctgcttggcacccgcctatatttgtggtccatttcattgttgttttggctgcacacacactaacacccactactcacaacccacatacataattgtacacacatgcatagcattaccatctaatatttcgacacactaaccggtattcaccacagctgaaacggaggttttgaaactttaatgaagagagcttgtatcacggttgttttacgaatttaatattttcgaacttttacttttcaatataacgttatgctttttaatcaaattatcttatattgaagtagatttaaaaaatagtaatataagaataataagtcacttggagttatatttttatatagtattagtaacttttgtttaaatcacttaaagaatgcggttttttaaaagcaactgtgattacactgctcattcgatttattttgtatgtagtcgagtagtttttagaaaccccctctgcatacagatacgtggaaattgcctgtgaaattaattcgaattttgttttgtttcttcttccgattttgttttttcttcttaactgtctcttgctgaatgtttgacttgtttgttgcttgtggtgtttcatggtgttctttaaacaaaatacaacaaatttaacgctttcatactcacacacacacacaaatacattatccaccactcacacaaacatgtacatgaatgctttggttgcccattaccgtttaccgataaccgttaaaccccttacaaacgaaacccaccgaacccaccacgactgttaatcccacccctcaaacgaaccgtttcgaactgccatccgaaaagtatgcaacaaaaaacaagtccagcaaaaagaagagcagcgccaaaaagcaggcaactccctcgaagaaacagcagcagaagaaaaacaaaaaggagcagcagttgacccccaatggaaaagagagcaagagcaagagcgcaatcaataagccagaaaaccaggctccgctgagcatcaaaatcaaccttaaggctctggcccaaaacgggcagtgtttgctgaaaactaaaacaccaccaatcctaaccaaatccccaaccgcatccccatcctcccatccaaacactagcgactccgactcggactttggcaaacggacgaagaagaagagcggcggcaaacgcagacgctcggccaacaatacaaactctagcaaatattccaattccttacagaattgccagttctgcacgtccggcgaaaacgaggacaagttgctactgtgcgacggctgtgacaagggctatcacacctattgcttcaagcccaagatggacaacattcccgatggcgattggtgagtaccagtaccagtaccagtcctgtatctctaaacatcctcattcctcacatgtcactgtcatagattacaaaaaagaaaacacattaatccgcgttgtcttgttgagcgttgatcgttaacctttgagaaactgtggcactgttcctctctctctgttcccaacgccaatccctaaactgctcaacatttagtaacttcaaatcctttccttctgctatttcaggtactgctacgagtgcgtgaacaaggccaccaatgagcgcaagtgcatcgtttgcggcggtcatcgtccgtcgcccgtggggaagatgatctactgtgacttgtgtcctcgtgcctaccacgccgattgctatataccgccgctgctaaaggtaccgcgtggcaagtggtactgccacggttgcatctcccgggcgcctccgccgaagaaaagaagtgcaggtggaacatccggcagcagcagcaaatctaggagggacagggatagggagtcgggcggatcggccaagcggcgtagcgacaacagcaagacaccagccatggagcacatgcagcagcagcagatgccactggcaggcggggattcccaccatcatcatcatcagcagccgccgtcgctgaactcctcgcacgatgagtcgatgaattctctgccggcggctcctctgaggtgagtgtgggggcctgcgggcggctgaatgggcggcggagtacacggtccgggttccagttaaataatgcctctgctctctgcagtccggcgcactcggtggtctcggccacgaactacgatgaccagcaccatgccaacaactcggtcgatggcagcagtcgcttccacgcgcatctcattcccccgtcaaataatggcactgcggctctgctggaagatgtgccgggtggcgccaatgtgatgcccggcgtctatccagtttatacgccagttgcggctggcaacttctcagccggattgattaaccaagcgccggtgcagccagcgatgccgtttgccaacgtggtcgccatgtcgccacgggctgtcacgcccacccgcacccgaacgcccacaccgacgccagcacccactccgccaccaccaccgccgacaccgctgctaatgcaggcctcgcccacagccaccgccctccatgtaaacgcctgccagtcaccgccccaacaacagcatgcgcagctgatgaccatgccctcgccaccagccattggagtcggaacggccactaaccaaatgtcgccaccgcccatcaacatacatgccattcaggaagccaaggagaagctgaagcaggagaagaaggagaagcacgccaccaagaagctcatgaaggagctggctgtctgcaagacgctattgggggaaatggaggtgggaactaaaagaactcttcaataagtaggttacctaacgttctttgcattacttcttgcagcttcatgaggactcgtggccatttcttttgccagtaaacaccaagcagtttcccacatatcgaaaaataatcaaaactcccatggacttgtccacaatcaaaaagaaattgcaagatttgaggttagtaacgcagcttaacttctataaaatcataaactcactagttgaacattttttttgaatagctacaaaacccgtgaggacttctgcgtggacgtgcgtcagatcttcgataattgcgagatgtttaacgaggacgattcgcccgttggcaaggcaggccacggcatgcgcaagttcttcgagtcccgctggggtgaactgactgacaagcactcctgatcctgcaccactagccagccacagatccagatggctaccagcaccagcagcacgatcaccattggcaccaccgtcacaccgaacaacatggccgtcacagcaacgcatcccattgaaatggtcaccctggtcgcggcaacgcaggaggatgaggaggcagccgtggagacgacaacagcattaactgaagcagcacaattttggtcaagagattagtttagattaagcagagattgtacataaatgggaggaatgaggagagggtcgagaagcacagcatacacattaatatatatatatatatatttatatatagtagatatataaacacacacgcgagagtattcaacgtcctacgtcggtaaagaccttggaaaggggtagctttgattaaattaaatcaccagccaaggcgaacaacagcgcaagtatgcaagtgaaaaagtgtattcagattttaagtatccaaggcggcagcggcagcagcagtatataaacaataactattagccgacataaactagcagttagaaatcgtatcgcataagaagccatctacagtagacgcccggactggatgaacgctgacaaatgacaaatgaacacgtacaaaaactgtctaccaatttccgatccgatcgatcgatccatcgtttgaacagtattttgtgcacaaagccgcgtcgctttattttctacacttacaattcgaaccctaattttaacaactattttttaagcaccaacgaagcgctcatttaagttttaaagtgtattttgtacttatagcaactccgaaatctgtatttaaacgtattataacaagtgctaacagttgcccaggcaaaaatgcgaacaattatactcaaaaaggcggtgcgaggaggacttgtaaatgtaaatgaaagcaaattaaaattaaatgtattaaattatttattctgtgtaaattttccacactgtagttggtactttgaatcgtaactttggcaaatcgcaaatacaactcgaaatcaaatcaaatcgaaactgagaataaacttaaattaaattatcgagaaaagatagaagcagccgaaggaaggaagaaagaaggcagtgcagtgaggcaaggtggacatatcctagcgggatctaagcgcaactccaggacagtattagaggcagtggaatccggatccggatccggcaagcaaggcatctgacattttagctg

SEQ ID NO: 42986 - DNA, 9314 bp, DROSOPHILA
atgaacaaaaatgccggcgatggcagcgatggcaaaaactcaaacaaaaactcgaatgcgggagggggtggtggagccggggggccacacgaccccaccggccttttagatgcagcttccctgttcgcttactggggacgtgatccaactggagcggcggctgcagcggcttccaatccgctcttcaactcgcagttcaatgccgccgctgctgccggattgggtttattgccacaagctggaggcgcctctgccaatgaccgttattccatggcagcagcagcggcggctgcggcgggagcccatcaccaccagaacacgatggcagtggccgcttcccaggccgccagtttggccggtttgcatccagcaattagctgcccaggattacttcagtcgcctgcaagcctcgggtctttccccctttccacatcccgatctggcggctgcctttggaccagctgggatgggaatgggcggcggtgctggtggagcgggtgctggaggtggtggagcaggtgtactcggccagggcggcggtggaaatggcggaagtggcaacggtggtggtggatcctcatcgggttcttccggcagcaagtcaaacaagtcgcgcaaggagaagcgagccgcccagcagcaacaacagcaacagcaaaatctggccaacagtctaaatgcggcagctgcggcggcagcagcagcagcagccaataatccagcagccgcgctggccagcatgcatggttttggtgtaggagttccgggcacgagcattccgtcggtgagcacaggtagcggatcaatatccacaaatagtggaggtcatggaagttacaagagcacggccagcgcttatggtaagccctcgactatgacgagcagcagcatggctaataatccgggctctgcctacgatccggtgaccctgcacaaggagctgctggccatgcaggccgtggcagccgctgcttccggctcaggatcaagcggttcctcaggcaagaagtccggtgggggtggctcctcatcctcctcgatgcacagccttggaatgggaattggtggcagcggtggcatgatgtccagtggcaaagcttcgaccagtgtgagcgcaagcaattcatcattgggaggaatgcaccccagtttgactagcagcaatccgctgatgtcgccccatgcgggcatgggctcctcgtcgtcatcatcgagcaaggatcgtgacaaaaacaatccctcgctcaacgctcttaactcgctctcacagtttggagccctgggaatgacgccacagcagagcatgcaggcggcaatgaatgcttttgcagccagcacaggagtttcgccatccgccacggtaacgtcctcgccgcaccactcttcccagcagcaacagcaaatgggagggaacagttccacgtcgggatcgggcaagtccagttccaaggattacatgatgggtactggaagtgagcacccatctctgcttggagttcgtttaccaccggacacggagataatcaagtacacgtcctcgattgtgggacccaagattcctggtactacctcgcgcggtcgcaaaaagactatttccgaaacagaacagcaaacaacacaacaacaacagaaacaacaacaccaagcagaacaacacctactccaacaacagcaacaagcacaaaaagagctcgacagcaccaaaaatgccatttcctctctgcttgcatttccaggtctcagtcccgcgaagcgggctagactcgaaatggagtacgcggcgatggctgcggccgctcaacagcagcatcagcaggcacagcagcaacaccaggcgcagcagcaactccacgggatgctcggagcagccggtatcccgggaatggctggactggtcggtctgcctggcatgagtggcaatcccctcgatcagttgagtgtaagcaaggccagttcttcaacggcgcccacaaccagtaccagttcctcctcagcagggagcaacctgctcaaccagagcaatagtgatcgcgtggaggtaatcaaactgccaccaacaattacttcaaacggagcctataatctctcaagtaagggaaaagaggtgcacgacctcaccaccgacatggccaccaactctggcggtgtgaatctcagcctaaagtccaatgctggctccagcgccttgacgcccagcggtgccgtcggatcggccagcaatcccattaccatcgatgactttgacgcaccacttaatctttccatgaagccctcggataagagcaatagtagctcgtcaaatgcagcagcagggggctcctcctcttccagcgcagcgttggctaacttggcgagcgattatcaggcagcgtccagtgggcaaagcggtaatagtctgcagagtttgagctctattacagctgctttgggtggaacaggaggtatgcctggtggttccatttccggcagcggaggaacctctccagctccagctggtgccggatcaggagccacgggtggtggttcgggatctggtggatccggcggtggatcgtcctcttacaaagagggaagacctcgtaacctgggacgcggcgtatccaagcccaagaagaacacggtagcttcgctgttggctcaatcccgagctgtgggccttaaacctatgctggccacgcaacaacttcttcaacagggtgctgatattgagaaaatccgcctggcactgagcgaagcgaatgcccatatggaaacttctacagattccgaaagcgtggcagccgaaagtggtctttcggagtctgagagtgaggatgccaacattctgaatgtagcggagctaagggtgccacttgaattgggctggaaacgggagacggtgattcgtggactgactaagcaagggcagatccgtggagaggtcacatattatgcaccaggaagcacgacgccgctaaagagcaacggacaggtttttgctatcctggagcagcagccatcgaatctaagtcgtgaaaactttagtttttccgcgcgagccattgttggttcattcctgcagcctgcaccaccgccgtacgccaatgatggcgagtacatacggatgacggacgaggacgtggccaagcggttagaggatctgaaggtcttcacccgccagactcttaacgtggaacagcgaattgagatcgccaagcaacagcaggcgatgcgtgatgctaagaagctgcaaaaggaagaattggccagaaataaggagaaggcgcgacaggagaagaactccaagttggagcagcagcgcaaggacaaggagctcaagaatcagcaggctgttgaggagcgcaaaaagcgtcaggaggagctagatcgccttaagcaagaggaattgcttaagaagcaacaggagaaagaaaagcgtcgtcaggaggccattttagctaaggaacaggaactacagaaacaaaaagagatgctgttggctgccgaaatggaacgagaacgtcgccgccaacacatgagcctcattcgaatgttggagcttcgtcggaaattcgaggatcgtgaaaagaagaaacaccagctggttctagaccgtttgcttctgcgtgagcgtcgtatggcggagcgaaaacgagatgcggagattctgcagttgataaggcgtcccaatgaggactccgaaatgccacaagaattggtaatccctgaactggataggattgccggcaaccgacttcccggccaggcaatggccgatttgctcatggtctttgaattcctacataactttggggagactctaggctttgacatggaatcactgccgtcgcttcagaacctgcacgatgctttaatgagcgatagcaacgcggatgcggaagaggagttgttgtcggtgatgacgcatctattggtttgtgccattgaggatccaggtgttcccaatcccggcagacacaccactttactgggacaatcgctacgcaatgcggacatcaccaactcgaatgtatccgaaatcttgaggatttatctgtatgctacggccacaggtgaagtgcgtcaaatgcacggaatcactgtggatcgtgagcgagagagaagggtgccggatcatcatcaactagatagcgataccacaacccactcacattcggtaaagaaccaggagtactataagcttctccatgaaaacgacacctggaagttgtcgcaatcgctgaaagatcgccccttcgttgcgttaaatcccacccgtaaagcccaaatgttggcccatctatgcaacgacctgctcatgaacaaggccgtgctccgccagattgatggaagtctagaaacgtgcgcccagatgcgaaaggagaaatacatgacggacatgaaggtgcgcaagtacaaggctctccacatgcgcaaggctcgaattgaggcctatgaacgagcacaggcggagcgtgaggcggctatgcaggcgttgatggcacagcagaagctggatgcagaacgtcttaaggcggaggaggaagccaaggccgcggcggcagaggaagcagcagctgcagcgggcacagatggagaggcaaccaaaggtggctcacccaatggcgagaagccggaagacggcgatcagaatgaagagggagccgccaaggaaccccagcagcagcaacagcagccaatggaagtggatggcgtggtcgatgaggcatctcttgtaagtccggccaaaaccatcattcaaacggacaatagtctgacgcccagtaaacaggacatgcccacacccacctaccaaattaatggatccagcacacctaccacaagtggtgtcactggaggcgacatgaatatcacgaatgtcgaggaggacgaggacaatcgcttgagtgccgatgagttgcaaaagaagctcgacaagattgtcagagcttccctaaactgcaaggaggcactggagaagagcacaaatcagttgagagctgcgtgctttgggcaggatcgcttctggcgtcgctactggaagttgcccaaggctggaggtattttcattgaagcacttgagtcggcccaaaatgatatttgcgattatcatgaggcattggaggccatggatgacaaaaaggatgcaaacgacgagaaagagaactccgaaaatgagaaggatgttgcagcggagtccagtgagcagccaatggaagtggatgagtccattacaaaactggaagatggtgtaccagcttcggacgtcgggatgcctgaaagtaatcaacagaacgcacatcaagatgaggaagatgacgatgatgatgtgacagaaatcaacaaggtggaaccggaaattgttgatttgggtgatgatgacgatgatgcagctcccccgctgcccaagatagaacctcccaggccagagattaaagttaaatcagagatggagctgatgggtccaccacccacgactatgatatccactaagacagactttgaagctgaaattaaaataccctctatgcctggcatcttgatgccgcctaccctcaacaacaacaacaccaataataacaataacaacaatggaagcgacaactgtgataagttggaaactggtttgggactaggacagcagcagcagaactttagccagtctgtgatcaagacggaggatgtgaaaaaagaggatgattgcataatagtttctacatccagtgttgacgatacaccaaagtggttctccattgtccggcgggaggttccattgatcagcgaactgccagcggaggagggaggcgtggtgggccaggaacttcagatcagctatgcaaatcagaactgctccgctcagctgcagctgcaaggtcatccgtgggatctgatcaacaacatgcagtactactcgattccgatggacgaatgcaaggtggacaccagcaagctgggcaacgagtgcatcttctcgctgagtggcctcgatgaaaagcaaatgctagccaaggtggaggagtacaaggcccacaaggtggagtcaaaaaacggtctgggctctcctcatcgccaccacgagactaaagatgatgaggagcaggccaagctgaagttggacaaggagattgacaccgaaatggaaacagatgcagatgacctagctggcaaggaaaagttttttcgcttgcgctctgatgtacccccggatacgggaggaggggtcagcgagggaaccgatgtaaagcccaagattgagcttcgtttggatgaggcgttgtcacaggcatattaccacaacatagccaacatgtcattgagcagtgttcaaacgtatatacccatcgatatccctctgccgctttccatgacccccgatgagcatcgtctgctggagcaggtcaagctggcaggttttccggaacgagttcacggagtttacgtgccccgcagacagcgctacggctggtggcagttggacgatgaacagaagctgcgccagctgctcaaaactctcaatccgtcgggattgagggagcgtgaactgcaggagaatcttcaacgattcctcggactggaacagccattgggtgtgaattataagctgaaatcggacatcgattttccagaggaattcctaatgcctgacaagaagggcgattggaatcccaaggtggccaaacgtgtggagcttgcccttatcgaacaactagaatcactggaggacaaggtggccagcgcttctatgcaattaaagaactggcaattgcccaaccgcgtggagagtgaactcaccttggactcgcaggaggatgtcaccgaagaggacttcgtcagcatcatacccatgatccgagagagaatcatcgacttggaggcaaatatcgaaagacaccagcataccaccacccagacgcagaactctgcatcggcagcagcatatctcctgcagatgcaacagcagcagcagcaacagcagttggcccagcagcagcagcaacagcaacagggttcgggtgcgggaaatagcctgaatccctcatccttcaacgagcgtactatggcattggcggcggcagcagctgcttcggggccaggaaacgcaaccggacggagaaccgaattccggcaacgcgtcaccggccagcaactgtgacagcgatcgggacgagaaggtggagcagatacccaagggattggtgcagtggcgggacgcagtatcccgatcgcacaccaccgcccagctggcgatggccctgtacgttctggaatcctgcgtggcttgggacaagagcattatgaaagcgtatgcaacaaaaaacaagtccagcaaaaagaagagcagcgccaaaaagcaggcaactccctcgaagaaacagcagcagaagaaaaacaaaaaggagcagcagttgacccccaatggaaaagagagcaagagcaagagcgcaatcaataagccagaaaaccaggctccgctgagcatcaaaatcaaccttaaggctctggcccaaaacgggcagtgtttgctgaaaactaaaacaccaccaatcctaaccaaatccccaaccgcatccccatcctcccatccaaacactagcgactccgactcggactttggcaaacggacgaagaagaagagcggcggcaaacgcagacgctcggccaacaatacaaactctagcaaatattccaattccttacagaattgccagttctgcacgtccggcgaaaacgaggacaagttgctactgtgcgacggctgtgacaagggctatcacacctattgcttcaagcccaagatggacaacattcccgatggcgattggtactgctacgagtgcgtgaacaaggccaccaatgagcgcaagtgcatcgtttgcggcggtcatcgtccgtcgcccgtggggaagatgatctactgtgacttgtgtcctcgtgcctaccacgccgattgctatataccgccgctgctaaaggtaccgcgtggcaagtggtactgccacggttgcatctcccgggcgcctccgccgaagaaaagaagtgcaggtggaacatccggcagcagcagcaaatctaggagggacagggatagggagtcgggcggatcggccaagcggcgtagcgacaacagcaagacaccagccatggagcacatgcagcagcagcagatgccactggcaggcggggattcccaccatcatcatcatcagcagccgccgtcgctgaactcctcgcacgatgagtcgatgaattctctgccggcggctcctctgagtccggcgcactcggtggtctcggccacgaactacgatgaccagcaccatgccaacaactcggtcgatggcagcagtcgcttccacgcgcatctcattcccccgtcaaataatggcactgcggctctgctggaagatgtgccgggtggcgccaatgtgatgcccggcgtctatccagtttatacgccagttgcggctggcaacttctcagccggattgattaaccaagcgccggtgcagccagcgatgccgtttgccaacgtggtcgccatgtcgccacgggctgtcacgcccacccgcacccgaacgcccacaccgacgccagcacccactccgccaccaccaccgccgacaccgctgctaatgcaggcctcgcccacagccaccgccctccatgtaaacgcctgccagtcaccgccccaacaacagcatgcgcagctgatgaccatgccctcgccaccagccattggagtcggaacggccactaaccaaatgtcgccaccgcccatcaacatacatgccattcaggaagccaaggagaagctgaagcaggagaagaaggagaagcacgccaccaagaagctcatgaaggagctggctgtctgcaagacgctattgggggaaatggagcttcatgaggactcgtggccatttcttttgccagtaaacaccaagcagtttcccacatatcgaaaaataatcaaaactcccatggacttgtccacaatcaaaaagaaattgcaagatttgagctacaaaacccgtgaggacttctgcgtggacgtgcgtcagatcttcgataattgcgagatgtttaacgaggacgattcgcccgttggcaaggcaggccacggcatgcgcaaccagccacagatccagatggctaccagcaccagcagcacgatcaccattggcaccaccgtcacaccgaacaacatggccgtcacagcaacgcatcccattgaaatggtcaccctggtcgcggcaacgcaggaggatgaggaggcagccgtggagacgacaacagcattaactgaagcagcacaattttggtcaagagattag

SEQ ID NO: 42987 - protein, 238 aa, DROSOPHILA
MNKNAGDGSDGKNSNKNSNAGGGGGAGGPHDPTGLLDAASLFAYWGRDPTGAAAAAASNPLFNSQFNAAAAAGLGLLPQAGGASANDRYSMAAAAAAAAGAHHHQNTMAVAASQAASLAGLHPAISCPGLLQSPASLGSFPLSTSRSGGCLWTSWDGNGRRCWWSGCWRWWSRCTRPGRRWKWRKWQRWWWILIGFFRQQVKQVAQGEASRPAATTATAKSGQQSKCGSCGGSSSSSQ

SEQ ID NO: 42988 - DNA, 3092 bp, DROSOPHILA
atgcatccacttgtacatcgtcagtttgctcatcaattactgggaaactcatgtcatctttagtgctcagattttgtttggtttctatgtattgtaatatttatttgaaatttattgtttctagattatttggttgatgtcacaactgccacagcgacgaaatcatcgcgttcagcagctcattccatagatttctgcatgcgtaaactaaacgttacttgtaaaccaatcgattaagaatttctgattgtgcccttttagatcgccgcggccgacagcctgttaaatcttcaaagaatatctgatcacgtgccgaagatgattggttgctgaatatgatctaaaacaaaaaacagacttaacaaagacactaaaatgatattctaactcgtcttatttaaaacattaagcaaacgtttatttatatgtatttttgtattttaaagtagtaaattagcttctatcaactacgttgtatcatatatagacatttaaccaattgcgacaaaattctttccacttgtccggccctttttgcattgtacataggattaaccaacccaattgaacctctgataatgccaaggaagagatgtctgtacaaatattgacaagaaactgctataacttataaatcactggaaatatttataccttctgcatctattgcgatactgaacttaatgatctgaaatcattacttcatagaagacaaataattattataacgactttaaattatatatgtttaataaattttgataaggtgtaaagcaatgtcctgttatctagttaggttattttcaaggcaattattcacagctctcagattccaacgattgatgtagtttaatctcaactctttaccaaagaagtccatttgtactagtgtaaaagatattttcaatactcttaaaatcgtggaaatacttttgggaatggtaagaattggcaaaatccgaagttttgacgatattatcgtcttaaatatttttaatttctttagtttagcaatccttgaagccgaagattaacaatcgaatctgtaattacccctgcggatgccttcaagtagccaccactcagcagcatcaccaccggaattcctaatgcccgaaatgtactaaataccaaccgatcccgctcaataacgccctccgcggaaatagccaggttgcccaatggatcgccctcgagcacatcggttcccgcattatagacgaccatatctggacggaactcggccagggactgcatcaggcagcgttttagttgccgcaggtagaatccatcctccgtgtagttgcgcagctccaccgcacaccgaatgctctccttggccacatgatcccgcggatagacaaaggcattgtacatgtcgaaaatgtagacggctgccacgttattgaagtcccgctcgtgcccattgccctgatgggcatccaggtccacaatcattatgcggcgcacccggaatggttcctgctcgaacagcctgacgatgagcagcgagatgtcagcatatggacagaaaccaccgcctctgtacgagcaacagtgatggaacccaccgcccaggttgatggcccaaccataatccaatgccagcttaccggccaaaatggaaccggctgcttgaaagcgcatgggtcgcaaataggaacgctgaatgtatcgattcgggacgaaggccatcagcggcacttcagcgatgcaggccacattcatgctccagcgcagtgactttaggtattcccttgtgtgaatacgacgcagctggtccttggtcagctccgtgggttcgtagaagctgccgtcgtcgagctgcagttgggcgcacaggagctgtggtccattgattggtatataaaagttcaggagatcgggaaatgcatacgaaccttgtgaatgtgcttgcccttggccgcatcgaagggatgtaggcgttcaaggccaccgaagcgaaccgcatagttccttgagaacacgatgggcagtttgccggcggagcgtgcgtcatcccgcttaacccagacaacctcctcggactcctgctcctcgtggtgcactcgctcagtcaggcgcttcattttgtggttcaatttaggcgtggattacatctgtccgacaccagttgaattggctacgcaaatagcaaatgcaatttcgcatctttggggttgggaacgggaatgggaaagggtggatgcgccatcagctggcggccggcaaaaagcttccattcaagcacttggactaagcttttgcataaaacaacaaatgcacttaaaataattttaatacactatgtgacttggacaatacatattacatgatattcacttggctaaaacacttattttgctttacttctataaactggtcggtcatggccatcttgcagttccctgtaggtgttaaggacgcgctggtcacgagagtccctcagttgccaaaagtgcttccactgttgatttatatcacaaaaaggaactacttctgtttagattacttaccagctccttgggaacatcgagaggagtcgggaaaacaaaccagatgactgcctcggcacagggaggagtagtaagcgaacctaaaacatatatgtatgaatggatatccaaaagccaaaagaaacatctcaccttggtaggtgaagtatttttggctgtctatgctagcaaaaaggtcctgcaaagccatgctgtcctccagaggacacgaatcatccaacttagttatgctggatacctgtttacagatcatgttcatagctggcgtctcgatgttcggatccttcaatggaaataagatggctagagtataggtaaagcgtagaggcacttcctacctcaaggttccttatgaacagggccaaaaccgcaaagccattcggctgcagaccggcctccttgttgcttttgtaactggcattcttgtgaacgatgtgcacctccccatcgtaatagttgccatccaagcagtgctccgatcccttgctcagtgcggagccccagtgaaagtgcaactggtcggcctcgaagacctgttggccttcagtactgatgcaaagggatggccgactgccg

SEQ ID NO: 42989 - DNA, 1036 bp, DROSOPHILA
aaatgaagcgcctgactgagcgagtgcaccacgaggagcaggagtccgaggaggttgtctgggttaagcgggatgacgcacgctccgccggcaaactgcccatcgtgttctcaaggaactatgcggttcgcttcggtggccttgaacgcctacatcccttcgatgcggccaagggcaagcacattcacaagctcctgtgcgcccaactgcagctcgacgacggcagcttctacgaacccacggagctgaccaaggaccagctgcgtcgtattcacacaagggaatacctaaagtcactgcgctggagcatgaatgtggcctgcatcgctgaagtgccgctgatggccttcgtcccgaatcgatacattcagcgttcctatttgcgacccatgcgctttcaagcagccggttccattttggccggtaagctggcattggattatggttgggccatcaacctgggcggtgggttccatcactgttgctcgtacagaggcggtggtttctgtccatatgctgacatctcgctgctcatcgtcaggctgttcgagcaggaaccattccgggtgcgccgcataatgattgtggacctggatgcccatcagggcaatgggcacgagcgggacttcaataacgtggcagccgtctacattttcgacatgtacaatgcctttgtctatccgcgggatcatgtggccaaggagagcattcggtgtgcggtggagctgcgcaactacacggaggatggattctacctgcggcaactaaaacgctgcctgatgcagtccctggccgagttccgtccagatatggtcgtctataatgcgggaaccgatgtgctcgagggcgatccattgggcaacctggctatttccgcggagggcgttattgagcgggatcggttggtatttagtacatttcgggcattaggaattccggtggtgatgctgctgagtggtggctacttgaaggcatccgcaggggtaattacagattcgattgttaatcttcggcttcaaggattgctaaactaaag

SEQ ID NO: 42990 - protein, 343 aa, DROSOPHILA
MKRLTERVHHEEQESEEVVWVKRDDARSAGKLPIVFSRNYAVRFGGLERLHPFDAAKGKHIHKLLCAQLQLDDGSFYEPTELTKDQLRRIHTREYLKSLRWSMNVACIAEVPLMAFVPNRYIQRSYLRPMRFQAAGSILAGKLALDYGWAINLGGGFHHCCSYRGGGFCPYADISLLIVRLFEQEPFRVRRIMIVDLDAHQGNGHERDFNNVAAVYIFDMYNAFVYPRDHVAKESIRCAVELRNYTEDGFYLRQLKRCLMQSLAEFRPDMVVYNAGTDVLEGDPLGNLAISAEGVIERDRLVFSTFRALGIPVVMLLSGGYLKASAGVITDSIVNLRLQGLLN

SEQ ID NO: 42991 - DNA, 3492 bp, DROSOPHILA
cacaatgatttccgaaacttgagatttctctcctttttcgaggatctggacactttaatcctggaccgcaacgtaaacctggacataaacacttttccttatttgccgagcttaaggatcttgtggtgattaccctgaatcttgcatacatgggtccacgcaataacacatattctattcgtcttgcaggatcaacaattgcgatatagcaaatataaccgattggatacaccgcatcgaacggcactgtcctgcgctggatcagctctcttgcatggggaatcctggcatccgcacagttttcgggggccaaggaccccgcgagtatatactacaggtgcttccccagctaaaatatctcgatggacttccaaccagcaggaatgcagcttatgcgacgctgtcttcctcacaaggacagggtccggactccacgagcaattcggaaaagcctccactcgcatccgcattcactttcaaggacatcatccgtccaaagtattccagaaaatcgcacagcggacggatgtttggcaacggctcctccacaaactgaagtaatatgccgaaggagggaggggtattccactgattgcattctgtcccattgttggactatttttaaccgtccgctggattatcagcgctgccctcgctgccctgcagtcgtcgattgcacctacagtgctatgcaagtaaatatgcatatggttattgccatgtacgtatataaatttgcaattgtatgacgatggacacgcacaaacctagtgagaattaatctagtgcattaaagcaatttttacaataataagagtcaatgacctcagcgaatagtcaagtatacaataggcaccatcttcagaataaatgttcttcgacttattctgaatgtcgttcagtgcccgattaattttacggatgtaagcacatgggcacgagttaatattgcttaaaacttgaggccaaagattaaaagtatgattcaaagcagttcattgcgtttaatctaaatttattacaggactatttttgcctacctcaataataaatgttttaaattatccggtttcaatgccgtcaacaatactagaccaccaaaaacagttgcttggatgcactgactataaaattgtttttactcctatttctttaattgtttatctatgtaacctgcttaaagaacagaaactggaaacccacttctgagaatatttggaaccattacattctggcatctattgcacaaattattagtgcttatattggtcaattcgatttaatttccaggtttccaaaggcagcctccaagggtacaatcgtttgtttagtcaaaagttgttcgagggcccattgactcaacttttgcagctccttccgtttggagctcacagcacgagagttgtccaaatggttgcagcacaagtaaatgccataaagggccctcaagttatgcggattaagcttcagggcctgcgaatagtaagtgcgagccgattccatattctcgacgccaccctgaaagaaaattaattcataagatggacttcattactggttagtgggcttatatagctcaccattgtgtatcgtatttctgccaaacgctggtgtattagatggctatgcggattgtgcagcaaaacctcctccatgcagaaggcagctttgccaaactcgccttcagccagatacatgttgcacagctcatgccatgcctcctggtcagacataaacctgaaggaatattaaatagttatgagattatcgtacatggtaagataagtagttgtctagcaaccggatgccggaaactaatttggttccgttcttccaaaaacaccatgaacttagctttcttacttcttcagatactcgttgagctccttgatggcctccaggcgacgaccacgggccttaaggatggcaatcttgcgcttcctgggcgcggcatttgtctcgtccttagcaatgattgcatccaggacctcgtcggcctcatcgtactgctccagggcctcgtagcgcatcgctttgaacttcatcacgcgcaggctgcccgggaactcgagggacagctgcttggtacacttggtggcgatgtcaaagcgagccgtatccaatgccgcgatgatcacctgctccaggatgagatgccgctcgttgccggtcttgtgcaccttgtcctctagcacagcaacccacagctggaccacctcctcgctgtggcgacccgtctcctcgcgccacgttctgaactgatcccgtacatctgaaaggatgatcatacgcttatgatacggcacttttcattcatggcaattgggagcaacccactgacgtggtctgcacctgtctggagccgggaaaagccgaaaacttacccgaccagctcatcttctcataatctagcgacatattcacttaggcggacttaaatatctcatcaatttaatttaatttcccaattgtaatcattaactagcgatttccttcttggcaaaataaaagtgtggcagcgtaatgagccgttagattataccaaataacactagcgtggcgctgccaacctgctttttgaatatcgtaaagtctagaaatgaagtcagaggtaattttttaaaactttttattataaagagacttctaaagttaagtttttctacatataccttgtttccgatatttgcaaagttaattaaactgttaatacttctgaaatacttgtaggtccttgaaaaggattctttaatgaattattttaccatgcattaatcttattttgtccaaactttgtgcattgcttatccattttaacagatttctaagtcaagtgcacatttgaaaagcgcgccaacgaaaacatgaaacatgatagtttttcttccagcgacggtcacactaacaaatcaaataattgtggtaccgtcaacaaaagccaagtctctcgtgctctccgggtattaaagccgtggaatcgggcagtgccgcatgcggtgctgtgtttaatttccccaactcccaacagatccggaagcagtttgaacatgggtccgccaaagcagctgaaacgaacctttcttggcttcgacttgagcacgcaaaaggtgagaactggaactgcctacgtagtatctttgcatctgagatgtggaggcgtctccaaatcgactacatctgggccaattgcgtgcgaatggtgttactggaaaaggtcaaacggtactcgggaacttgaaacacgaactactcttatcagttgcggtgaccggggctcgattttcgcttatctgctaaagacgcgagcgccaaccgatttaactattatggtttgattattgaaattcatgttcggaggtattggcccccgacattatcttaatagagccgcaataactttcacaatccctgaatgacgctggcggtgactcctagttgccctctatgtttgatcgttattttcgaggtgtgtctccatatcgctaattgctg

SEQ ID NO: 42992 - DNA, 1192 bp, DROSOPHILA
gaaatcgctagttaatgattacaattgggaaattaaattaaattgatgagatatttaagtccgcctaagtgaatatgtcgctagattatgagaagatgagctggtcggatgtacgggatcagttcagaacgtggcgcgaggagacgggtcgccacagcgaggaggtggtccagctgtgggttgctgtgctagaggacaaggtgcacaagaccggcaacgagcggcatctcatcctggagcaggtgatcatcgcggcattggatacggctcgctttgacatcgccaccaagtgtaccaagcagctgtccctcgagttcccgggcagcctgcgcgtgatgaagttcaaagcgatgcgctacgaggccctggagcagtacgatgaggccgacgaggtcctggatgcaatcattgctaaggacgagacaaatgccgcgcccaggaagcgcaagattgccatccttaaggcccgtggtcgtcgcctggaggccatcaaggagctcaacgagtatctgaagaagtttatgtctgaccaggaggcatggcatgagctgtgcaacatgtatctggctgaaggcgagtttggcaaagctgccttctgcatggaggaggttttgctgcacaatccgcatagccatctaatacaccagcgtttggcagaaatacgatacacaatgggtggcgtcgagaatatggaatcggctcgcacttactattcgcaggccctgaagcttaatccgcataacttgagggccctttatggcatttacttgtgctgcaaccatttggacaactctcgtgctgtgagctccaaacggaaggagctgcaaaagttgagtcaatgggccctcgaacaacttttgactaaacaaacgattgtacccttggaggctgcctttggaaacctggaaattaaatcgaattgaccaatataagcactaataatttgtgcaatagatgccagaatgtaatggttccaaatattctcagaagtgggtttccagtttctgttctttaagcaggttacatagataaacaattaaagaaataggagtaaaaacaattttatagtcagtgcatccaagcaactgtttttggtggtctagtattgttgacggcattgaaaccggataatttaaaacatttattattgaggtaggcaaaaatagtcctgtaataaatttagattaaacgc

SEQ ID NO: 42993 - protein, 282 aa, DROSOPHILA
MSLDYEKMSWSDVRDQFRTWREETGRHSEEVVQLWVAVLEDKVHKTGNERHLILEQVIIAALDTARFDIATKCTKQLSLEFPGSLRVMKFKAMRYEALEQYDEADEVLDAIIAKDETNAAPRKRKIAILKARGRRLEAIKELNEYLKKFMSDQEAWHELCNMYLAEGEFGKAAFCMEEVLLHNPHSHLIHQRLAEIRYTMGGVENMESARTYYSQALKLNPHNLRALYGIYLCCNHLDNSRAVSSKRKELQKLSQWALEQLLTKQTIVPLEAAFGNLEIKSN

SEQ ID NO: 42994 - DNA, 3578 bp, DROSOPHILA
tgttgcagcacaattggaaattttgttaaataatgaaagttcgttctccacgccattttgattagcgtaactcagaaattaaatgcagatattatgacaaatattcttcctggttttatttgaagaaaaggttaacagggactggaaatattcgttttgtaatatttaggatcggcttttgggatccaaacaagaatatttctctttccctctttttccaaataatttaaatattttaaaaaccgctgaaaaaaacttaagtcgaacatttttacggattataccttgatcgtacgaaacatacaaaaaatatagatatgtaaaatatagatgtatgtagaaagcttaaaataaatttgtcaaaaataaattgggtccttgaataaattttcaacgaacggaagcctttttaaatttgtagaaattttgtagaaaaagattataaattcccgacatatcttagaaattagtttataaatttcaaagcatactcttaggcatccacctaaaaggagttgtaaaaagttgctaacgaagtcatacaaatgtgctctactctttttttttatcatatcgagtgatccaggaatcgaaaggtgaagaataagccaaaaaggatcgcatcccaatggctttgatggctccgtaccaaaaatttacaaatacaacaaactgtatttatttagtcgattgcaaatttatttttcgtctctaaaataaatctctgctgttttgcaagtcactgtgcaaatgacactaggtttttcgtttttatattttatttttgataattaatttaagcatcaaaataatatgtcataccgttgagtctgttgaggacatctagcccctctgcgaaaactaaactacaagtctggccagagaatacaggatgtaaccagctaaagcaaccagcgaggatgcgaatgcatagtgaaggaccttcaggctgcaaacattttatgttacttaaagcgattggaaagtgtcattttgaaactcaccgcatcctcagcttcagacccttggcaatggactccgcggtgggtttctccttgccaatatagagacgcattccatacatggcggccttgaaatagtcattccaatccaactgggccatgtcgaagtcgtaaaggttgcgatcctgcttggacatcgcttcccttagctccattgtgttggtcatgtcaaagttccaggtggtactggagaacggacccaggacggcgatgttcttgtgaatcttccgatacagatccacgagtatgggcttccggcccttgaggcgcagcagcagatcgaagaagtagccgggaagggtgtgtaagaagaaggcggccagcggaaatagggatgtggtggagatgcacaggacgaagggataccacagcatcttggttagcggtatgatgtcccgatagataatagatgatttgataaagtttccgtagctcatcaggttattctcgctaggtgcaaacgcgtaaatggggggcgtcgtgacctttccattctgtacggatatctccgccgttctccaagcgcaagccaatgccacatttacgcagtagtcagcgggaactaggctgatcttggctgaagggtccaccgtggtgacccgcattataccgcgagctccgccgaagcagagggccagtggtccgaataggttgtccacccatccaaccaggggctccttgtaagtggacattactgggaatatttaagttgcagcttttgaaggttattcccaatctggtgcacttactgatcgccggtcggaagatggacagtggcaggttgcccgcctcccgcaggatcacatcctcggccagggctttggtgtaggtgtacgtgttggggaaggagccaacaaggctaggttccatcgcgtccagtaatttattgcttaccagttcacccacggctaggatcttatccgaactgcagttcaagtgctccggatagaatcgctctgcgatgtcatgcaccacgcagttggagtaggcagtggatacgtgaacgaaggacaccagctgggtcatctgcttggccagttgaagcatcagacgagtggctcgtacattgatggccaaggagatgtgtaaagcctcgtcgaatcgcacggttgcagctccatggattacaatctgcacctcggcggtcaggatcctttgatccgattggcttatacccagatccggatccaagcagtcgcccgcgatgggacaaactcgctgcaaggcatctggcttcgtccttaggagcacctcaaacaccttcgaaacacgagcggtcaggacacatctgtcactctagcactgaatatcactcaccggatcctttgcccaggttgtgattcggtcctcgataggcactccccgcttaggtctaattaaggagtaaatccgattgacttccgtggtcctcagtagtttctcaatgatcactgaaaagcacactccataagcttgcgaaaagattcgaggagtggggtaccttttcccagaaatccggtgccacccgtaaggaacacggtcttgttcttaaagaatccttgtatctcgctatccattttgttccgagtaagggtcttgaacgcgttgcgagccagtgaactgaaaagtgattccaaactagcgcttctatttatttgggaatctataagttacacccaacaaaggtcgagttcagcatattcaagacacccaatggtctcccgttttagggaggagctcgtgctctaaactcagcgaaagtttattttttgggtatagataattatttgtgttgcttcgattaaaggcctagttgcatttattaattatatttttgcttacgaatgaaaataaccttggtgcatttaatttaaaattttaaagttgattcgagacttagtatagagctgccatctcttgcgtgaaattcaaattagtatatgtgtgaatggtaaacaagaatggtaaatgataaattgcatgcgatgactttgtatttccgcgtatataaattttgtatgggcacgtgtaagaagtccccgatcagtcgttacgtaatcgcatataagtatcctcgtgactacaccgtatatgtgctagaccttgtattctgtataggaaccacacatatatatgttatatcataacattttatataccaatttatggcctatttatttcaataaggtttgatcaatagaataccagagagcgatttcaattaaaaaattattacattataataggtgcatactattgtatatatatcacttcttgatgtaaccagttgcgtatactttatgcaatcgattgtgtcactcagtgcacctatttagatcggctcgtgaggaaaaaaccttatagctaccaccattcaagtaattaaataaaagacatgtctatgtgttgtatatatttatttaattccatgacgcaattacgaaagtgagtcggtgggttgcctatgtactgctgaatcagactaggatccttaccaacgaccacagtgctagtagtgccacaaagcaaaggacaccttgcaggatatgatggagcagctttaaactaaaatacaat

SEQ ID NO: 42995 - DNA, 1416 bp, DROSOPHILA
atggatagcgagatacaaggattctttaagaacaagaccgtgttccttacgggtggcaccggatttctgggaaaagtgatcattgagaaactactgaggaccacggaagtcaatcggatttactccttaattagacctaagcggggagtgcctatcgaggaccgaatcacaacctgggcaaaggatccggtgtttgaggtgctcctaaggacgaagccagatgccttgcagcgagtttgtcccatcgcgggcgactgcttggatccggatctgggtataagccaatcggatcaaaggatcctgaccgccgaggtgcagattgtaatccatggagctgcaaccgtgcgattcgacgaggctttacacatctccttggccatcaatgtacgagccactcgtctgatgcttcaactggccaagcagatgacccagctggtgtccttcgttcacgtatccactgcctactccaactgcgtggtgcatgacatcgcagagcgattctatccggagcacttgaactgcagttcggataagatcctagccgtgggtgaactggtaagcaataaattactggacgcgatggaacctagccttgttggctccttccccaacacgtacacctacaccaaagccctggccgaggatgtgatcctgcgggaggcgggcaacctgccactgtccatcttccgaccggcgatcataatgtccacttacaaggagcccctggttggatgggtggacaacctattcggaccactggccctctgcttcggcggagctcgcggtataatgcgggtcaccacggtggacccttcagccaagatcagcctagttcccgctgactactgcgtaaatgtggcattggcttgcgcttggagaacggcggagatatccgtacagaatggaaaggtcacgacgccccccatttacgcgtttgcacctagcgagaataacctgatgagctacggaaactttatcaaatcatctattatctatcgggacatcataccgctaaccaagatgctgtggtatcccttcgtcctgtgcatctccaccacatccctatttccgctggccgccttcttcttacacacccttcccggctacttcttcgatctgctgctgcgcctcaagggccggaagcccatactcgtggatctgtatcggaagattcacaagaacatcgccgtcctgggtccgttctccagtaccacctggaactttgacatgaccaacacaatggagctaagggaagcgatgtccaagcaggatcgcaacctttacgacttcgacatggcccagttggattggaatgactatttcaaggccgccatgtatggaatgcgtctctatattggcaaggagaaacccaccgcggagtccattgccaagggtctgaagctgaggatgcggtga

SEQ ID NO: 42996 - protein, 471 aa, DROSOPHILA
MDSEIQGFFKNKTVFLTGGTGFLGKVIIEKLLRTTEVNRIYSLIRPKRGVPIEDRITTWAKDPVFEVLLRTKPDALQRVCPIAGDCLDPDLGISQSDQRILTAEVQIVIHGAATVRFDEALHISLAINVRATRLMLQLAKQMTQLVSFVHVSTAYSNCVVHDIAERFYPEHLNCSSDKILAVGELVSNKLLDAMEPSLVGSFPNTYTYTKALAEDVILREAGNLPLSIFRPAIIMSTYKEPLVGWVDNLFGPLALCFGGARGIMRVTTVDPSAKISLVPADYCVNVALACAWRTAEISVQNGKVTTPPIYAFAPSENNLMSYGNFIKSSIIYRDIIPLTKMLWYPFVLCISTTSLFPLAAFFLHTLPGYFFDLLLRLKGRKPILVDLYRKIHKNIAVLGPFSSTTWNFDMTNTMELREAMSKQDRNLYDFDMAQLDWNDYFKAAMYGMRLYIGKEKPTAESIAKGLKLRMR

SEQ ID NO: 42997 - DNA, 4469 bp, DROSOPHILA
agtcgtctggtctgcggaggcgacacagaagccgtttacctagttgataatattgtttaaatgtcaagccttttgaattccttacctaaattatataatatttcaattgttgaaatcaattagttactgtatttaattttcgtatatttattattttctttatatactccaaaattggcttagatcaaagcacctgtcttacatctacgtctagtttaagcttaggactctatattcgtatacaggtgtttatgggtttaatgccttggcaattccaatttaaatattctcgttttgggtgctgctgtgttgtttggtcttatgattcatactcatatccgtcttaaatcctatttcgttggctaatttggaatagatttatgcgtgttttgaactaccttatttaatggatgaactaacttggattcaatgcatattaggctaagcgaatataataaatatagtatgtataagtatgtacagtgcagctcttaggcctacttttgttcgattctccgcgattcctcagatttgtattgtttgagcatttttaactgcatttggatgcggatttgggttatgagtattattacatcgttatgttcaattaggatttcaatttaacacgaacccaaattatttttctacagcaatgttgagtatggcatatacattattgtatttatcagcgatagagtgactatccccgtataattcactgagtggtcctcctttaaggtttcttatccagatgggatcctccagattttagtccctagtagaatcgttcgaacttgggcgccttgttgagtgcgcagaaataataccctgaatagttttgtgtggctccgggtggagtataatcgccgatgctgtagttcccgtagtcgtagttacccatgtgggcgtggtgatggtgatgggcgtggtgctggtggtgcatgtggtgggtgtgcggggggtggtaatgctggaaacctcctgcactccttggcttttgtcatgtgagcaggctgttgccaccaccaactccgctgccggtggaggactctccaccaactccggttgccccattgctgccattgctgctgttgttgttgccgtggacgcgcatgtgccgattcaagttccccgactgcgaaaatctgtggacaccaaaaaagcaattaactcgatgtataacgttccaggactgctctttgggggcctaagccttttttaaggggtaattttcatctttagcattacatttgaataaacaattattatttcatttaatttcagttctttagttgaagttgaaaatcttacgaaaatgcatgaatgaaaatgaatgatgcatattatctttggttttccttttttttaagcttgcaacagtctcagttttgttcaagttgttagttttatattgaaacgatagaaattattaaactatctttaaagctttaagggtttacgtaaaagtaaaagcaaaaccattttcgttcgtttaggaatgaggaaggacggtgtaagtaaatcccccatcccggactcacctgagcaggcagagcttgcactggtagggcttctcgccactgtggattcgcaggtgcttggtgagggtgctgctgtccgagaaggacttcttgcacgaggagcagcggtacggccgctcgccggagtgggtgcgcatgtgcgtggtgacactggaactctgcgagaatctccggtcgcagatggggcagcggaacggcttctggccggtgtgtgtgcgtacgtgagccgtcaggttggctgcctgcgagaagctcttgttgcagtcggggcatcgatagggtctttcgccggaatgggtccgcagatgggtcttgagcgtgctgggccgggcatatgtctttccgcacaaccggcatagattgggtttcatctcgccgccactgctgccctcatcgccgtccagatcctcgttgctatcctcctcgtcctcgaaggcggatagacttaagcccagggcggctgcctgatagctggtgggacttttgtggggcggtgtgtatccctgattgcccacccccgtgggatagtagccagccaaagaggagttggccggcggcgatggcgactccttttcgcccaccgtcagcggtggcagggcacccagacccgtgggagccggtgcccgaaaatccgctgtaaaggaatatgtggccgaggcaggatagtgaccgggactcagcagcggtgggtatagcacatttaccgccgctgctgctgctgccgccgaggtggagttactgggtggcgtccagttcatctgggagcactgcattggcacgccgcctgcatcaccggcaccgtagccatggtgcatggtcatgttcatgctgacgttcacgctcatgctgggatacatggctgccgccggaggaggaggtggtgcggccgttccagcactggtttcatagtagcaactggcagcgttggccactcctccggcactaccattactgccgatattgttgccaccactgctttggaggagagagttgcctacgtgcgatgcctggacttgggattgctggtgctggtgctgctggtgctgcgagtgcatctggccatgattgtgggagttcggcgaaatgagcatctggtgcggatgcactgtgtaggagagtgaggcggcctggtgcggattgccggcggcaaagttgtaggaagcgccgcagggcgagaatgggaacaggctgggcagcggatcgatgtccagcggcggtaggccgggaaatgtggaagccatctcgtcggtgctccagtagccgtgattacccgaggagcctcctccggcaccgttgttgctgctcccgttgccgctgctcgccggtggtgtcgtgctgatctggatgtggccgccaccgatgcccacgcccactccaatcgtgggatcgaaacagccgccgcagtcgaagtcgctgctggtgagcgaggagatgggcagggcggtgctgccctggcaggataggcagccgacgcaggaagcggcgcactcttgctgcacgagcgaaaacggaaatggagattgagaccggttatgaaatacattcagttagtactaatacgtaactaagacaaaataattagttagttagtggaaacatttagtaaattttaactatttttacattctaatactgacttctgaggagagtttaattgtattacatatggaaggaatttctaagctattaaacttcccaatagataaaatcgtatgggttaaaaatgtaatagattactttaaaaacgaaaatgataaacttcttagtacaaaactgtctgatttttcagttaccgatatagcaaattaaaataaccacaatttcggtattgggttctatttcctggttataaaatttaaatagttcaggtatatcacagatttcagctaagttctttccacgaaacaagcacaaccgaacgctcgaagatttccggagatattgaggcgaaatcgaaaaaggattccaggactcacctgagggctgtccagcgccaggccgaacaggggattgttgggcacatagcccgtctctggttccacaggaccgccgtttgagacatcgcacgatatgtacatagctccaccctcttgatcttccagggaatctgcgcagccaaaaaaaaaaaaaaaagaacagcatgaaaatcactggaagtacgccagagatgctcgccagcagcgcgtatctcatggatacatttttgctcccatgacaaccactgtgcgcactagctccgcccctcgagacacacacagacacacacaaatacacaaatcgagagaccgccatttgctttgctctctcgactcgcgactttccatccgtgtatcgccatacaatatgctgtatctgcatatctgtgcaatggtgcttccgatttcactcacccagaattgtgttcaggagtttggaacccttatataacaatcccatgacatgactccacttctggaacgtttgggctcagcagtcgcgcatttgttcctgcttttcctacgcttcatcttgatgcgttaatttccaactgcaaggcgatgacggaacattattggtaaattctaattaagattcactttctattcatttattcaaatctattattcaatttattatttattcaatcaaataccaatatcaaatctaatcttcatatattttcaataaagtgttaataaattcagttttaaataaagttcgacagctaatcagaaattagatacacaatatgacagattcttcacctctaaatttaaaagagatatcgaattatagatcgctcttatgacgaagatggatttcaattcgattgtttcattattgttaggactaaaaaattatactaaaattacaataactttcattttgaaagaaacaaaacgttaaaattgctatttaactaatttatgcatgcaaatcaaagtaaat

SEQ ID NO: 42998 - DNA, 1773 bp, DROSOPHILA
cttcgagcgttcggttgtgcttgtttcgtggaaagaacttagctgaaatctgtgatatacctgaactatttaaattttataaccaggaaatagaacccaataccgaaattgtggttattttaatttgctatatcgcaagagtgcgccgcttcctgcgtcggctgcctatcctgccagggcagcaccgccctgcccatctcctcgctcaccagcagcgacttcgactgcggcggctgtttcgatcccacgattggagtgggcgtgggcatcggtggcggccacatccagatcagcacgacaccaccggcgagcagcggcaacgggagcagcaacaacggtgccggaggaggctcctcgggtaatcacggctactggagcaccgacgagatggcttccacatttcccggcctaccgccgctggacatcgatccgctgcccagcctgttcccattctcgccctgcggcgcttcctacaactttgccgccggcaatccgcaccaggccgcctcactctcctacacagtgcatccgcaccagatgctcatttcgccgaactcccacaatcatggccagatgcactcgcagcaccagcagcaccagcaccagcaatcccaagtccaggcatcgcacgtaggcaactctctcctccaaagcagtggtggcaacaatatcggcagtaatggtagtgccggaggagtggccaacgctgccagttgctactatgaaaccagtgctggaacggccgcaccacctcctcctccggcggcagccatgtatcccagcatgagcgtgaacgtcagcatgaacatgaccatgcaccatggctacggtgccggtgatgcaggcggcgtgccaatgcagtgctcccagatgaactggacgccacccagtaactccacctcggcggcagcagcagcagcggcggtaaatgtgctatacccaccgctgctgagtcccggtcactatcctgcctcggccacatattcctttacagcggattttcgggcaccggctcccacgggtctgggtgccctgccaccgctgacggtgggcgaaaaggagtcgccatcgccgccggccaactcctctttggctggctactatcccacgggggtgggcaatcagggatacacaccgccccacaaaagtcccaccagctatcaggcagccgccctgggcttaagtctatccgccttcgaggacgaggaggatagcaacgaggatctggacggcgatgagggcagcagtggcggcgagatgaaacccaatctatgccggttgtgcggaaagacatatgcccggcccagcacgctcaagacccatctgcggacccattccggcgaaagaccctatcgatgccccgactgcaacaagagcttctcgcaggcagccaacctgacggctcacgtacgcacacacaccggccagaagccgttccgctgccccatctgcgaccggagattctcgcagagttccagtgtcaccacgcacatgcgcacccactccggcgagcggccgtaccgctgctcctcgtgcaagaagtccttctcggacagcagcaccctcaccaagcacctgcgaatccacagtggcgagaagccctaccagtgcaagctctgcctgctcagattttcgcagtcggggaacttgaatcggcacatgcgcgtccacggcaacaacaacagcagcaatggcagcaatggggcaaccggagttggtggagagtcctccaccggcagcggagttggtggtggcaacagcctgctcacatga

SEQ ID NO: 42999 - protein, 461 aa, DROSOPHILA
MASTFPGLPPLDIDPLPSLFPFSPCGASYNFAAGNPHQAASLSYTVHPHQMLISPNSHNHGQMHSQHQQHQHQQSQVQASHVGNSLLQSSGGNNIGSNGSAGGVANAASCYYETSAGTAAPPPPPAAAMYPSMSVNVSMNMTMHHGYGAGDAGGVPMQCSQMNWTPPSNSTSAAAAAAAVNVLYPPLLSPGHYPASATYSFTADFRAPAPTGLGALPPLTVGEKESPSPPANSSLAGYYPTGVGNQGYTPPHKSPTSYQAAALGLSLSAFEDEEDSNEDLDGDEGSSGGEMKPNLCRLCGKTYARPSTLKTHLRTHSGERPYRCPDCNKSFSQAANLTAHVRTHTGQKPFRCPICDRRFSQSSSVTTHMRTHSGERPYRCSSCKKSFSDSSTLTKHLRIHSGEKPYQCKLCLLRFSQSGNLNRHMRVHGNNNSSNGSNGATGVGGESSTGSGVGGGNSLLT

SEQ ID NO: 43000 - DNA, 2291 bp, DROSOPHILA
atatcaaaattatattttaatataaataaaaagtaataacaacatgtaaagcaatataattgagtgataattcaaaatggcagattataaaacaaaactcacggaaaacttctaagaatgcattgcaagcatttgctacgactttctcgaaataatccgattctcttataagttcaaatatgaatataataaaagtagaacaaaaaatctaatccgaacataaatacttaagctattttttatcaattttatttgtgatctcggcttatttttcctatcatgtttgatttggtacattgctatgaatatcataaacctttatacagctgtcttagtgtcgtcggtaacccaatggatcggcgtttattgatagcaaatatttaatatagttcatgagacttattttgtctgcaggaaggaaatcattgtgagaattattatttggcaaatgtactcgatagcacaaaacgaggaactaaacagaagaaaattccactataaaagacttaattgcaactccagaaaatcagaacacagcatctagcaaattcgattatttcactgcggacttcttagtaaattccatcaaatttcaaaatgaaataccttttcgtggttgcccttattgccctggccatccagatggcttcctctgctagtaacacaacaacaactgatgccaccaccacaacaacaaccaccactgcagcatcaaccacaacaacaacaacggccgcttccactcacaaaaagctttgttggaggggcaacaactggtgccacacccgcattcccaagcggaagtgcaagaatcccaagaggtgccacaagaccatcgtgattgtgacccacaggaaaaactagttttgttcttttctggacgatatatactgaaataaatgataaaaaagaactcaaacattttttttttttttttttgaagcagtaataacaattttattaaggaagaatttttgtgatctttaaaagtgattggtgtctaaatcatccattgtggttctccgcagacgcatttccggatcttctgctggagattgcgaatatcgctaatgagctgctgacaaagttggggcttttcgggacagcccgtgcaggcctttccaccaggaccacacggttggcactcacaggcaccacccagggctagatcggagaatccaatgagcaggatgcaagctggggatattgaggatgcgagatattgaagttggttgtggattaaagatcttattatgtagttaccgatgatggtgactgcgatcagtttcatggttctatctagattgagactactttaccagatggtaccaactcaaggaaagcaacacctttatatagcgcaaaaagttagctggatcaatggaaaatttcagtgagcacatccaaaaataaaaagtactggacaaaccaattgtattaaaataaataaaacaccaaacacttggctttttatacggcaggcgctttatttatagaattaactttttatagatacttattaatttaatatatttgttactcagatataatttagatttcattttatgagtaatactttctttagtaaaaagggcatgtaaaatgttatattatattagtatgaacgatgacacagaaaatggtgagaacaaagggcgaagtttaatatcgtgtttctatttgcttaagcacaaatggttatatattttatttttggatgaattcaatgaaatttccattgatcctataacacatttgttttgctataaaaggggtagggtgttcataaacggttaccatctggtaaagttaatttgttaaagcaacaaccatgaagctgctcgttgtcgccgtcattggtaagtgccaaaaagtactattttttatgtgacccaaatccacttagccatccgttcattctgacccagcgtgcatcatgctcatcggattcgccgatcctgcctcgggctgcaaggattgttcatgcgtgatttgtggacctggtggcgagccgtgtcctgggtgttccgcacgggttcccgtctgcaaagatctgatcaacattatggagggtcttgagcggcaggtgcgtcagtgcgcctgcggagagcaggtttggctgttctagagatgtgccctcaacctaatcggcactgaccttttatctgctggcatttaaaactgctgtctaataaaactattatcattcctgcacgacccaaactccttttctttgttttttaattatttattttcagatgtattgcttaaaaagtgtcagaactagtctt

SEQ ID NO: 43001 - DNA, 225 bp, DROSOPHILA
atgaaactgatcgcagtcaccatcatcgcttgcatcctgctcattggattctccgatctagccctgggtggtgcctgtgagtgccaaccgtgtggtcctggtggaaaggcctgcacgggctgtcccgaaaagccccaactttgtcagcagctcattagcgatattcgcaatctccagcagaagatccggaaatgcgtctgcggagaaccacaatggatgatttag

SEQ ID NO: 43002 - protein, 74 aa, DROSOPHILA
MKLIAVTIIACILLIGFSDLALGGACECQPCGPGGKACTGCPEKPQLCQQLISDIRNLQQKIRKCVCGEPQWMI

SEQ ID NO: 43003 - DNA, 2293 bp, DROSOPHILA
tattcataagctcgaagagctgggcgagcaaaagagatcccagccaagttatttgatgctaatggaaatgcataaaaagatcgtaaatactcattagcaaagtgtgtggtttctagctatgtatatggcaaagaaagttgcccccatggcggggtcagcacatctcacccaatcatttgcggggtcaacatattttggaaagttactgttgtagggaaagttctatttttggagcgcgtctaagaaatattcccaaaaattagcacactgatccacattcgatgaaaagaaatcgcagagcggaaattactagtgaattcggggaattcacttgacttgcaatcaatctatatctctttgatattcattactaatttatgcacgtgtacaaaatgatagcaatcaggaaatccgattgattaattaagctaatggttcttttgcataacaagacaatggtattgtaagctatttgaagaaatcctgtctatcctgcgtaagaaattatcaacttattgttaatctaaaaaataagttttaataatatgtagttttctttctaaaacagttcattaaattagcgtatgtcatattttgcaaagtatttcctaattaagtgagtcaagtaagtaaatttcctaacaagtaagtcaaaccaaagttacccatcaggcgtggtcatttaaaccataatatgtacggctctctacacccgaactagtttttagaaaatatttcgaaccgtttagaatcgcgacctgcgacccgatctcttttggccaacggtcaacaaaccgcaaactgatttacagcccccagtggcaaaggcaaaaaaaaaaatggagagagctttgccattccgaatggctggctctctttctctctctctctctctccggatcgatcgctctttttggcagaacatgggcttttggccaaaaccgtttgtagacggcacataaaaagctcgggtcgcaatgctcccccaacagttcggcaaacgaaacctctgtctgtggacccccagaaatcgggagcttgattaagaaccagagcgatacaagtcgagaatcccagtgcgtgcgtgaaattagaaacccgaagaaaatccacaaaaaaaccatgaccaagttcgtggtggtgggcatgtgcctgctgatggccttcggccatatggcttccgtttccgccgtgaccgaggctccggaggtggagcagtcaacggagtcgcccatcgccgacatggcgctgattggtaggcccacggatccaatgtcttcccctaacccctagaatttccattaatttatacctgtgtttctcttttttttttcatgtgccgtgtgttttgtttatgtgtgcattttttgtttctgtgatttttgtgcgggtggcgcagaggatgcgccaatggctcccaaaactcccacggagaagccgcccattgtccaggaagccgcaatggtggtggacgctcaggagaagtccgcacaggtggccccacaaccccacacggtggctgactttatcatccacccgctgatcgccttcaagccacgccaggcctccctagaggagatccagggcaaacaggccacaccgagctccagtgccccggcctccccgggcacctggctcttcggcatgaatcccgctcagcagctgggctcctccttttcgacgcttgctggttccgtttccggttggttcaatgatcgcctggcagctgccggacagcagttgcccggtttggtggaaaccccggtgagggagtcaaccacaagcaccagcaccaccacatcaacgaccacccagcgcccagacattgtggtgcgagtacagcagcgtccccaaaggaatggcaaccgcaatggaaaccgcaatggcaatggaaacctcaatggtggaaacctgaacaacaacaggcgtcgtcagcgacctaaccgcttcaataaccgactggactccttcgaggacgactactacgaggacgattacttccagggcaaccgattcgatgacgagttcgacgacgatgaggacgagcaaagcctggagcaattcgaggatgacgattccctggagctgcgtcctcagcaaaaacccaagcgcaaacagacccaggtgcagacccaaaatcagcgcaggaagttccagcaagaggagcaggtgatcagccagaagcgccgccaatcggtgacccagaacaagaagcccaaggttcagaagaagccagttcagccggtggttgaggagtcacaggatgaggaggaattggacgatgatgagaacg

SEQ ID NO: 43004 - DNA, 293 bp, DROSOPHILA
acgaaacctctgtctgtggacccccagaaatcgggagcttgattaagaaccagagcgatacaagtcgagaatcccagtgcgtgcgtgaaattagaaacccgaagaaaatccacaaaaaaaccatgaccaagttcgtggtggtgggcatgtgcctgctgatggccttcggccatatggcttccgtttccgccgtgaccgaggctccggaggtggagcagtcaacggagtcgcccatcgccgacatggcgctgattggtaggcccacggatccaatgtcttcccctaacccctag

SEQ ID NO: 43005 - protein, 56 aa, DROSOPHILA
MTKFVVVGMCLLMAFGHMASVSAVTEAPEVEQSTESPIADMALIGRPTDPMSSPNP

SEQ ID NO: 43006 - DNA, 3529 bp, DROSOPHILA
ctgaaaagtgattccaaactagcgcttctatttatttgggaatctataagttacacccaacaaaggtcgagttcagcatattcaagacacccaatggtctcccgttttagggaggagctcgtgctctaaactcagcgaaagtttattttttgggtatagataattatttgtgttgcttcgattaaaggcctagttgcatttattaattatatttttgcttacgaatgaaaataaccttggtgcatttaatttaaaattttaaagttgattcgagacttagtatagagctgccatctcttgcgtgaaattcaaattagtatatgtgtgaatggtaaacaagaatggtaaatgataaattgcatgcgatgactttgtatttccgcgtatataaattttgtatgggcacgtgtaagaagtccccgatcagtcgttacgtaatcgcatataagtatcctcgtgactacaccgtatatgtgctagaccttgtattctgtataggaaccacacatatatatgttatatcataacattttatataccaatttatggcctatttatttcaataaggtttgatcaatagaataccagagagcgatttcaattaaaaaattattacattataataggtgcatactattgtatatatatcacttcttgatgtaaccagttgcgtatactttatgcaatcgattgtgtcactcagtgcacctatttagatcggctcgtgaggaaaaaaccttatagctaccaccattcaagtaattaaataaaagacatgtctatgtgttgtatatatttatttaattccatgacgcaattacgaaagtgagtcggtgggttgcctatgtactgctgaatcagactaggatccttaccaacgaccacagtgctagtagtgccacaaagcaaaggacaccttgcaggatatgatggagcagctttaaactaaaatacaattagatgtaatacactttgtaagaaacagaaaagacaatggaaactaccgcttaatgagcttcttgccctgtgcaatggactctggggtgggtgcctcgtttcccaagaactgtctcatgccacgcagagcttgaacgaagtattccttccagttgaggctgaccatatcaaagtagtatatccttcgatcctcctccgacatctgctgcctcaagtgatccgtattccgcatgtcaaagcgccagcttttgcaggcgaatgggcccaggatgccgagagtcttgtggatcttttggtaaacctttactagtctgggcttccggccactcagccagagagccaggtcaaaaaagtaggctggcagggtgtgatagaagaaagctgccagggggaagagccacggcactgtgatgcagtggatgaagggataccatatcatctttgtcagcgggcagttggtgcgtccatcgagagcatgtcgaatgaactccccgtgggtgatcttgttctgctcaatgggcgccagttggtagatgagaggagtttcttgtgttcccatctcgttaccttccacaatggtcttccaggtacaggccagagtcaaattggcacaataatccacgggcaccaggcttgcctcggcatggtgatcgatggtggcaatgcgcagtactccacgggccaccccgaaaagaattgccattggtccgtacatgttgtctatccagccggagatgggttccttgtgggccgcaataactgggtaagggtagaaatgacaagatgtagacagagtacgtaataaggattacttactgactgccggtcggaagatgcaaagtggcaagccacccgcttccttcaggatcacatcctccgccagtgctttggtgtacgtgtacgtgttgggaaacgagccaaggagcgcttgctccatgttgtccagtagctcgtcactcatcagctctgccattgcaagcaccttatcggaactgcagttgagatgctcggggtagaaattttccttgatgttgtagataacgcagttggagaaggcggtcgatacatgaacgaaggcctccagctgcctcatttccttggccagttgaatcatcagcttggtggcccttgtgttgatggccagggccacgtgaagcggctcattgaatcgcacggtggcagctccatggatgacaatctgcacctcggaggccagaagtcttcgatcattctcgctgattcccaaatcaaagtcgaggcaatccccagcgatgggacatactctttgaagtgcctccggcttggacttcagcagcagttcaaataccttttccacacctttcgagtgagtatttcttttaaatttcctatcgccttacttaccgcatcttttgaccaggtgataatccgatccttaatctcaactccgcgctttggtctaattagcacatagatgcgtttcacctctgtggtccgcaaaagtttctcaataacgactttacccaaaaagccggtggctccagttaggaacaccgttttgctccggaagcatctttgaatatccgtatccatttttagaagtatggtttacgcttgaattggcggcgaaaaaaagtctatccgatagaagcaaaagttgcagtcgtttttaacaaagaacggctttaatgaaaatcaccttgatttcactgcggatatttatacaaaattttcgaccgtgcggtgaactgaagacccagggctggtaatcacgaataatattatagaacttacttacgcatctggtttccaattttattgtatgccagggtaatggctcctaaaagtagtgaaagttgtttgctatttaaataaactcttcagtttactttattactgcacccctgtcttatttccctatatgttcatttccatattcttttaatcgagtatagcctatttgctaaccaaatgcgctacaaaggaggtctaagtacggatttcaagtaagattatgaaatacgaaccatttcttgtttgtagaatttattggctgtcagtgtcgttccctattgaaacatttaatttagtgatgaaaacaactaaatataaagattaaattacgaatattttgaaaaataaataataaatgatacccagaaggttttagattagttcatgattagataaccggttatttacatttattaaaaaatattaatgtgtaatttaaatacttatttttgcgaacatgtcgacataaatatgtaacgctctacctttgtgttgaaactgtgaagatttcaaatttatcaacttcctatgtttttccgccaaagtagtaatgactgtaaaaaatgtatgtttgcaattgcctacttttgaaataagcagctaactggatttgttttaaaacgtcatggcagcctagacgaaatacggtctgcagcttaacattttgtgtcacaaaaataaaataaataaataaaaagataataattattttgagcatcgcgcatgtgatgtagaaaaagtcttacccgcgcccatagcccatcgctagagccaactatcgatatatatagtatcgatt

SEQ ID NO: 43007 - DNA, 1416 bp, DROSOPHILA
atggatacggatattcaaagatgcttccggagcaaaacggtgttcctaactggagccaccggctttttgggtaaagtcgttattgagaaacttttgcggaccacagaggtgaaacgcatctatgtgctaattagaccaaagcgcggagttgagattaaggatcggattatcacctggtcaaaagatgcggtatttgaactgctgctgaagtccaagccggaggcacttcaaagagtatgtcccatcgctggggattgcctcgactttgatttgggaatcagcgagaatgatcgaagacttctggcctccgaggtgcagattgtcatccatggagctgccaccgtgcgattcaatgagccgcttcacgtggccctggccatcaacacaagggccaccaagctgatgattcaactggccaaggaaatgaggcagctggaggccttcgttcatgtatcgaccgccttctccaactgcgttatctacaacatcaaggaaaatttctaccccgagcatctcaactgcagttccgataaggtgcttgcaatggcagagctgatgagtgacgagctactggacaacatggagcaagcgctccttggctcgtttcccaacacgtacacgtacaccaaagcactggcggaggatgtgatcctgaaggaagcgggtggcttgccactttgcatcttccgaccggcagtcattattgcggcccacaaggaacccatctccggctggatagacaacatgtacggaccaatggcaattcttttcggggtggcccgtggagtactgcgcattgccaccatcgatcaccatgccgaggcaagcctggtgcccgtggattattgtgccaatttgactctggcctgtacctggaagaccattgtggaaggtaacgagatgggaacacaagaaactcctctcatctaccaactggcgcccattgagcagaacaagatcacccacggggagttcattcgacatgctctcgatggacgcaccaactgcccgctgacaaagatgatatggtatcccttcatccactgcatcacagtgccgtggctcttccccctggcagctttcttctatcacaccctgccagcctacttttttgacctggctctctggctgagtggccggaagcccagactagtaaaggtttaccaaaagatccacaagactctcggcatcctgggcccattcgcctgcaaaagctggcgctttgacatgcggaatacggatcacttgaggcagcagatgtcggaggaggatcgaaggatatactactttgatatggtcagcctcaactggaaggaatacttcgttcaagctctgcgtggcatgagacagttcttgggaaacgaggcacccaccccagagtccattgcacagggcaagaagctcattaagcggtag

SEQ ID NO: 43008 - protein, 471 aa, DROSOPHILA
MDTDIQRCFRSKTVFLTGATGFLGKVVIEKLLRTTEVKRIYVLIRPKRGVEIKDRIITWSKDAVFELLLKSKPEALQRVCPIAGDCLDFDLGISENDRRLLASEVQIVIHGAATVRFNEPLHVALAINTRATKLMIQLAKEMRQLEAFVHVSTAFSNCVIYNIKENFYPEHLNCSSDKVLAMAELMSDELLDNMEQALLGSFPNTYTYTKALAEDVILKEAGGLPLCIFRPAVIIAAHKEPISGWIDNMYGPMAILFGVARGVLRIATIDHHAEASLVPVDYCANLTLACTWKTIVEGNEMGTQETPLIYQLAPIEQNKITHGEFIRHALDGRTNCPLTKMIWYPFIHCITVPWLFPLAAFFYHTLPAYFFDLALWLSGRKPRLVKVYQKIHKTLGILGPFACKSWRFDMRNTDHLRQQMSEEDRRIYYFDMVSLNWKEYFVQALRGMRQFLGNEAPTPESIAQGKKLIKR
